(19) United States
(12) Patent Application Publication
(10) Pub. No.: US 2026/0000761 A1
(43) Pub. Date: Jan. 1, 2026

(54) ENGINEERED IMMUNE CELLS WITH ENHANCED POTENCY AND USES OF SAME IN IMMUNOTHERAPY

(71) Applicant: NKARTA, INC., South San Francisco, CA (US)

(72) Inventors: James Barnaby Trager, Albany, CA (US); Ivan Chan, Millbrae, CA (US); Don-Hong Wang, Palo Alto, CA (US); Guangnan Li, Foster City, CA (US); Alexandra Leida Liana Lazetic, Portland, OR (US); Chao Guo, San Francisco, CA (US)

(21) Appl. No.: 18/729,489

(22) PCT Filed: Jan. 18, 2023
(86) PCT No.: PCT/US2023/060850

§ 371 Date: Jul. 16, 2024

Related U.S. Application Data
(60) Provisional application No. 63/300,978, filed on Jan. 19, 2022.
(60) Provisional application No. 63/366,586, filed on Jun. 17, 2022.

(51) Int. Cl. A61K 40/31; A61K 40/11; A61K 40/15; A61K 40/42; C07K 14/725; C07K 16/30

(52) U.S. Cl. CPC A61K 40/31; A61K 40/11; A61K 40/15; A61K 40/42; C07K 14/7051; C07K 16/30

(57) ABSTRACT

Several embodiments of the methods and compositions disclosed herein relate to immune cells that are engineered to express chimeric antigen receptors as well as genetically edited or otherwise engineered enhance the persistence the cells in immunotherapy. In several embodiments, the cells are edited to knock out a target gene that encodes a protein involved in antigen processing and presentation by major histocompatibility complex class I molecules. In several embodiments, a mixture of immune cell types is used, optionally in allogeneic therapy. The engineering and editing of the cells, such as NK cells and/or T cells exhibit enhanced cytotoxicity and/or persistence, as well as reduced risk of reduced graft versus host, host versus graft, and graft versus graft effects.

### CROSS-REFERENCE TO RELATED APPLICATIONS

[0001] This application claims priority to U.S. Provisional Patent Application No. 63/300,978, filed Jan. 19, 2022 and U.S. Provisional Patent Application No. 63/366,586, filed Jun. 17, 2022, the entire contents of each of which is incorporated by reference herein.

### FIELD

[0002] Several embodiments disclosed herein relate to methods and compositions comprising genetically engineered cells for cancer immunotherapy, in particular combinations of engineered immune cell types. In several embodiments, the present disclosure relates to cells engineered to express chimeric antigen receptors. In several embodiments, further engineering is performed to enhance the efficacy and/or reduce potential side effects when the cells are used in cancer immunotherapy.

### BACKGROUND

[0003] As further knowledge is gained about various cancers and what characteristics a cancerous cell has that can be used to specifically distinguish that cell from a healthy cell, therapeutics are under development that leverage the distinct features of a cancerous cell. Immunotherapies that employ engineered immune cells are one approach to treating cancers.

### INCORPORATION BY REFERENCE OF MATERIAL IN SEQUENCE LISTING FILE

[0004] This application incorporates by reference the material in the Sequence Listing contained in the following XML file being submitted concurrently herewith: File name: NKT083WO_ST26.XML; created Jan. 18, 2023, which is 1,617,920 bytes in size.

### SUMMARY

[0005] Immunotherapy presents a new technological advancement in the treatment of disease, wherein immune cells are engineered to express certain targeting and/or effector molecules that specifically identify and react to diseased or damaged cells. This represents a promising advance due, at least in part, to the potential for specifically targeting diseased or damaged cells, as opposed to more traditional approaches, such as chemotherapy, where all cells are impacted, and the desired outcome is that sufficient healthy cells survive to allow the patient to live. One immunotherapy approach is the recombinant expression of chimeric receptors in immune cells and further engineering or genetically editing the cells to avoid adverse immune responses against the therapeutic cells in order to achieve the efficient and persistent targeted recognition and destruction of aberrant cells of interest.

[0006] In several embodiments, there is provided a population of genetically engineered immune cells, comprising genetically engineered immune cells that express a chimeric receptor comprising an extracellular ligand binding domain, a transmembrane domain, and a cytotoxic signaling complex, wherein the immune cells are genetically edited at one or more target sites in the genome of the immune cell to yield reduced levels of expression of a protein which is encoded by a gene which comprises an edited target site as compared to a non-edited immune cell, the genetic edit results in a decrease in the frequency of cell surface expression of major histocompatibility complex class I (MHC I) molecules, and the genetically engineered immune cells are further engineered to express at least one immunosuppressive effector that exerts suppressive effects on the cytotoxic activity of Natural Killer (NK) cells and/or T cells.

[0007] In several embodiments, the at least one immunosuppressive effector exerts suppressive effects on the cytotoxic activity of one or more of non-engineered NK cells, non-engineered T cells, genetically engineered NK cells, and genetically engineered T cells. In several embodiments, the population of genetically engineered immune cells comprises genetically engineered NK cells. In several embodiments, the population of genetically engineered immune cells comprises genetically engineered T cells.

[0008] In several embodiments, the genetic edit is to TAPBP. In several embodiments, the genetic edit is to TAP-2. In several embodiments, the genetic edit is made to a gene encoding one or more of: TAPBP (Tapasin), TAP-2; UGT-1 (UGTA-1), TAPBPL (TAPBPR), TAP-1, ERp57; Calreticulin (CRT); Endoplasmic reticulum aminopeptidases ERAP1 and/or ERAP2, and/or one or more immunoproteasome components selected from the standard proteasome catalytic subunits β1, β2, and/or β5, and the inducible proteasome catalytic subunits LMP2, MECL-1, and LMP7. In several embodiments, the genetic edit is to a gene involved in antigen processing and/or MHC I complex assembly. In several embodiments, the immune cells are also genetically edited to reduce expression of TCR alpha (TRAC).

[0009] In several embodiments, the genetically engineered immune cells comprise one or both of genetically engineered NK cells and genetically engineered T cells. In several embodiments, the population of genetically engineered cells is allogeneic to the NK cells and/or T cells whose cytotoxic activity is suppressed by the at least one immunosuppressive effector. In several embodiments, the at least one immunosuppressive effector exerts suppressive effects on the cytotoxic activity of one or more of non-engineered natural killer cells, non-engineered T cells, and suppressive engineered cells. In several embodiments, the at least one immunosuppressive effector exerts suppressive effects on the cytotoxic activity of one or both of genetically engineered NK cells and genetically engineered T cells. In several embodiments, the at least one immunosuppressive effector exerts suppressive effects on the cytotoxic activity of cells that do not comprise the immunosuppressive effector, and wherein the cells that do not comprise the immunosuppressive effector are either non-engineered or engineered cells.

[0010] In several embodiments, a plurality of the genetically engineered immune cells comprises one or more additional genetic edit to a gene encoding one or more of CISH, CBLB, B2M, CD70, adenosine receptor gene, NKG2A, CIITA, TGFBR, and any combination thereof. In several embodiments, the wherein the genetic edit and/or the additional genetic edit is made using a CRISPR/Cas system. In some embodiments, wherein the genetic edit and/or the additional genetic edit is made using a RNA-guided endonuclease. In several embodiments, the genetic edit (and/or the additional edit or edits) reduces host versus graft rejection as compared to immune cells without the genetic edit (and/or the additional edit or edits). In several embodiments, the population of genetically engineered immune cells exhibits one or more of enhanced expansion capability, enhanced cytotoxicity against target cells, and enhanced persistence, as compared to immune cells that do not express the immunosuppressive effector and do not comprise the edited target site.

[0011] In several embodiments, there is provided a population of genetically engineered immune cells comprising a plurality of T cells expressing a chimeric receptor, wherein the chimeric receptor comprises an extracellular ligand binding domain, a transmembrane domain, and a cytotoxic signaling complex and the plurality of T cells comprise a genetic edit to TAPBP and/or TAP-2.

[0012] In several embodiments, the plurality of T cells comprises a genetic edit to TAPBP, optionally wherein the genetic edit to TAPBP decreases the frequency of T cells in the population that exhibit cell surface expression of MHC I molecules. In several embodiments, the plurality of T cells comprises a genetic edit to TAP-2, optionally wherein the genetic edit to TAP-2 decreases the frequency of T cells in the population that exhibit cell surface expression of MHC I molecules. In several embodiments, the the immune cells are genetically edited to reduce expression of TCR alpha (TRAC). In several embodiments, the population further comprises natural killer (NK cells), optionally wherein a plurality of the NK cells comprises a genetic edit to TAPBP and/or TAP-2. In several embodiments, the T cells and/or the NK cells are genetically engineered to express a chimeric receptor comprising an extracellular ligand binding domain, a transmembrane domain, and a cytotoxic signaling complex.

[0013] In several embodiments, the population of genetically engineered immune cells comprises engineered NK cells and engineered T cells. In several embodiments, the chimeric receptor expressed by the engineered T cells binds to one or more of a NKG2D ligand, CD19, CD70, BCMA, CD20, and CD38. In several embodiments, the chimeric receptor expressed by the engineered NK cells binds to one or more of a NKG2D ligand, CD19, CD70, BCMA, CD20, and CD38. In several embodiments, the chimeric receptor expressed by the engineered T cells and the chimeric receptor expressed by the engineered NK cells bind to different targets. In several embodiments, the the cytotoxic signaling complex of the chimeric receptor expressed by the engineered T cells and/or the engineered NK cells comprises a CD3 zeta subdomain. In several embodiments, the cytotoxic signaling complex of the chimeric receptor expressed by the engineered T cells cand/or the engineered NK cells omprises an OX40 subdomain or a 4-1BB subdomain.

[0014] In several embodiments, the at least one immunosuppressive effector comprises a virally-derived peptide. In several embodiments, the at least one immunosuppressive effector comprises a peptide derived from a retrovirus. In several embodiments, the at least one immunosuppressive effector comprises a peptide derived from an envelope protein of a retrovirus. In additional embodiments, the at least one immunosuppressive effector comprises at least a portion of human CD47 and/or at least a portion of HLA-E. In several embodiments, the at least one immunosuppressive effector comprises at least a portion of human CD47. In several embodiments, the immunosuppressive effector comprises a peptide having at least 95% sequence identity to SEQ ID NO: 829, 997, 999, 689, or 1014-1017. In several embodiments, the at least one immunosuppressive effector comprises a chimeric construct comprising at least one virally-derived peptide and at least a portion of a human protein and/or at least a portion of a human protein complex.

[0015] In several embodiments, the at least one immunosuppressive effector is integrated into the chimeric receptor. In several embodiments, the at least one immunosuppressive effector is integrated into the chimeric receptor between the transmembrane domain and the extracellular ligand-binding domain. In several embodiments, the at least one immunosuppressive effector is integrated into the chimeric receptor within the extracellular ligand-binding domain. In several embodiments, the extracellular ligand-binding domain comprises an scFv and the at least one immunosuppressive effector is integrated into a linker region of the scFv. In several embodiments, the at least one immunosuppressive effector is integrated into the chimeric receptor within an N-terminal region of the chimeric receptor distally positioned from the extracellular ligand-binding domain in relation to the cell membrane. In additional embodiments, the at least one immunosuppressive effector is integrated into the chimeric receptor at a plurality of locations within an extracellular region of the chimeric receptor. In several embodiments, the at least one immunosuppressive effector is bound to an extracellular membrane of the immune cells. In some embodiments, the at least one immunosuppressive effector comprises a transmembrane protein. In some such embodiments, the transmembrane protein is selected from CD8a, CD4, CD3ε, CD3γ, CD3δ, CD3ζ, CD28, CD137, glycophorin A, glycophorin D, nicotinic acetylcholine receptor, a GABA receptor, FcεRIγ, and a T-cell receptor. In several embodiments, the transmembrane protein comprises a CD8α transmembrane protein. In several embodiments, the immunosuppressive effector is expressed on the immune cells by a disulfide trap single chain trimer (dtSCT).

[0016] In several embodiments, the immunosuppressive effector is encoded by a nucleic acid or comprises a peptide having at least 85% sequence identity to one or more of the nucleotide or amino acid sequences of SEQ ID NOs: 683-894, 997-1000, 1014-1017, 1020-1023, 1027, 1029, 1031, 1033, 1035, 1037, 1039, 1041, 1046, 1048, 1050, 1052, 1054, 1056, or 1058-1093. In some embodiments, the immunosuppressive effector comprises a peptide having at least 95% sequence identity to SEQ ID NO: 829, 997, 999, 689, or 1014-1017. In several embodiments, the immunosuppressive effector is encoded by a nucleic acid having at least 95% sequence identity to SEQ ID NO: 830, 998, 1000, or 690.

[0017] According to several embodiments, the genetically engineered immune cells provided for herein reduce the risk of graft versus host disease as compared to genetically engineered immune cells not having the genetic edit. In several embodiments, the genetically engineered immune cells provided for herein reduce the risk of fratricide among the genetically engineered immune cells. In several embodiments, at least a portion of the genetically engineered immune cells are engineered to express membrane bound IL-15.

[0018] Also provided for herein, in several embodiments, is a method for the treatment of cancer in a subject comprising administering to the subject at least a portion of a population of genetically engineered immune cells provided for herein. Additionally, there is provided the use of a population of genetically engineered immune cells provided for herein for the treatment of cancer in a subject or for the preparation of a medicament for the treatment of cancer in a subject.

[0019] In several embodiments, there is also provided a method for the treatment of cancer in a subject comprising administering to the subject a population of genetically engineered immune cells, wherein the population of genetically engineered immune cells comprises a plurality of T cells that (i) express a chimeric receptor comprising an extracellular ligand binding domain, a transmembrane domain, and a cytotoxic signaling complex; and (ii) comprise an edit to TAPBP and/or TAP-2. Additonally provided for is the use of a population of genetically engineered immune cells for the treatment of cancer in a subject (or for the preparation of a medicament for the treatment of cancer in a subject), wherein the population of genetically engineered immune cells comprises a plurality of T cells that (i) express a chimeric receptor comprising an extracellular ligand binding domain, a transmembrane domain, and a cytotoxic signaling complex; and (ii) comprise an edit to TAPBP and/or TAP-2.

[0020] In several embodiments, the cancer is a hematologic cancer, optionally a B cell cancer. In several embodiments, the cancer comprises a solid tumor. In several embodiments, the population of engineered immune cells is allogeneic to the subject. In several embodiments, treatment of the subject with the population of engineered immune cells produces a decrease immunologic response as compared to treatment of the subject with a population of engineered immune cells not comprising the genetic edit. In several embodiments, the population of engineered immune cells persists for a longer period of time in the subject as compared to a population of engineered immune cells not comprising the genetic edit.

[0021] Provided for herein, in several embodiments, is a method of manufacturing a population of genetically engineered immune cells comprising (a) contacting a population of immune cells with an RNA-guided endonuclease to genetically edit one or more target sites in the genome of the immune cell, wherein the genetic editing reduces expression of a protein which is encoded by a gene which comprises an edited target site as compared to a non-edited immune cell, wherein the edit decreases the frequency of cell surface expression of major MHC I molecules within the population of genetically engineered immune cells, (b) contacting the population of immune cells with a polynucleotide encoding a chimeric receptor comprising an extracellular ligand binding domain, a transmembrane domain, and a cytotoxic signaling complex, and (c) contacting the population of immune cells with a polynucleotide encoding at least one immunosuppressive effector that exerts suppressive effects on the cytotoxic activity of suppressive cells. In several embodiments, the immunosuppressive effector is encoded by a nucleic acid or comprises a peptide having at least 85% sequence identity to one or more of the nucleotide or amino acid sequences of SEQ ID NOs: 683-894, 997-1000, 1014-1017, 1020-1023, 1027, 1029, 1031, 1033, 1035, 1037, 1039, 1041, 1046, 1048, 1050, 1052, 1054, 1056, or 1058-1093.

[0022] In several embodiments, there is provided a method of enhancing the in vivo persistence of genetically engineered immune cells comprising (a) contacting a population of immune cells with an RNA-guided endonuclease to genetically edit one or more target sites in the genome of the immune cell, wherein the genetic editing reduces expression of a protein which is encoded by a gene which comprises an edited target site as compared to a non-edited immune cell, wherein the edit decreases the frequency of cell surface expression of major MHC I molecules within the population of genetically engineered immune cells, (b) contacting the population of immune cells with a polynucleotide encoding a chimeric receptor comprising an extracellular ligand binding domain, a transmembrane domain, and a cytotoxic signaling complex; and (c) contacting the population of immune cells with a polynucleotide encoding at least one immunosuppressive effector that exerts suppressive effects on the cytotoxic activity of suppressive cells. In several embodiments, the immunosuppressive effector is encoded by a nucleic acid or comprises a peptide having at least 85% sequence identity to one or more of the nucleotide or amino acid sequences of SEQ ID NOs: 683-894, 997-1000, 1014-1017, 1020-1023, 1027, 1029, 1031, 1033, 1035, 1037, 1039, 1041, 1046, 1048, 1050, 1052, 1054, 1056, or 1058-1093. In several embodiments, the genetic edit is made to a gene encoding one or more of TAPBP (Tapasin), TAP-2, UGT-1 (UGTA-1), TAPBPL (TAPBPR), TAP-1, ERp57; Calreticulin (CRT); Endoplasmic reticulum aminopeptidases ERAP1 and/or ERAP2, and/or one or more immunoproteasome components selected from the standard proteasome catalytic subunits β1, β2, and/or β5, and the inducible proteasome catalytic subunits LMP2, MECL-1, and/or LMP7.

[0023] In several embodiments, there is provided a method of manufacturing a population of genetically engineered immune cells comprising (a) contacting a population of immune cells with an RNA-guided endonuclease targeting TAPBP or TAP-2, wherein the immune cells comprise T cells and the edit decreases the frequency of cell surface expression of beta-2-microglobulin (B2M) within the population of genetically engineered immune cells, (b) contacting the population of immune cells with a polynucleotide encoding a chimeric receptor comprising an extracellular ligand binding domain, a transmembrane domain, and a cytotoxic signaling complex, and (c) contacting the population of immune cells with a polynucleotide encoding at least one immunosuppressive effector that exerts suppressive effects on the cytotoxic activity of suppressive cells.

[0024] Methods are also provided for enhancing the in vivo persistence of genetically engineered immune cells comprising (a) contacting a population of immune cells with an RNA-guided endonuclease targeting TAPBP or TAP-2, wherein the immune cells comprise T cells and the edit decreases the frequency of cell surface expression of beta-2-microglobulin (B2M) within the population of genetically engineered immune cells, (b) contacting the population of immune cells with a polynucleotide encoding a chimeric receptor comprising an extracellular ligand binding domain, a transmembrane domain, and a cytotoxic signaling complex, and (c) contacting the population of immune cells with a polynucleotide encoding at least one immunosuppressive effector that exerts suppressive effects on the cytotoxic activity of suppressive cells. In several embodiments, the immunosuppressive effector is encoded by a nucleic acid or comprises a peptide having at least 85% sequence identity to one or more of the nucleotide or amino acid sequences of SEQ ID NOs: 683-894, 997-1000, 1014-1017, 1020-1023, 1027, 1029, 1031, 1033, 1035, 1037, 1039, 1041, 1046, 1048, 1050, 1052, 1054, 1056, or 1058-1093. In several embodiments, the genetically engineered immune cells exhibit one or more of enhanced expansion capability, enhanced cytotoxicity against target cells, and enhanced persistence, as compared to cells that have not been contacted with a polynucleotide encoding at least one immunosuppressive effector. In several embodiments, the genetic edit is to TAPBP. In several embodiments, the genetic edit is to TAP-2. In several embodiments, a plurality of the genetically engineered immune cells comprises an additional genetic edit to a gene encoding one or more of CISH, CBLB, B2M, CD70, adenosine receptor gene, NKG2A, CIITA, TGFBR, and any combination thereof.

[0025] Also provided for herein is a population of genetically engineered immune cells comprising genetically engineered immune cells that express a chimeric receptor comprising an extracellular ligand binding domain, a transmembrane domain, and a cytotoxic signaling complex, wherein the immune cells are genetically edited at one or more target sites in the genome of the immune cell to yield reduced levels of expression of a protein which is encoded by a gene which comprises an edited target site as compared to a non-edited immune cell, the genetic edit results in a decrease in the frequency of cell surface expression of major histocompatibility complex class I (MHC I) molecules, and the genetically engineered immune cells are further engineered to express at least one immunosuppressive effector that exerts suppressive effects on the cytotoxic activity of natural killer cells and/or T cells. In several embodiments, the the genetically engineered immune cells comprise one or both of genetically engineered natural killer (NK) cells and genetically engineered T cells.

[0026] Also provided for herein is a population of genetically engineered immune cells one or both of genetically engineered natural killer (NK) cells and genetically engineered T cells wherein a plurality of the genetically engineered immune cells are engineered to express a chimeric receptor comprising an extracellular ligand binding domain, a transmembrane domain, and a cytotoxic signaling complex, the immune cells are genetically edited at one or more target sites in the genome of the immune cell to yield reduced levels of expression of a protein which is encoded by a gene which comprises an edited target site as compared to a non-edited immune cell, the edits result in a decrease in the frequency of cell surface expression of MHC I molecules within the population of genetically engineered immune cells, and the genetically engineered immune cells are further genetically engineered to express at least one immunosuppressive effector that exerts suppressive effects on the cytotoxic activity of one or more of non-engineered natural killer cells, non-engineered T cells, and engineered cells.

[0027] Also provided is a population of genetically engineered immune cells, comprising one or both of genetically engineered natural killer (NK) cells and genetically engineered T cells wherein a plurality of the genetically engineered immune cells are engineered to express a chimeric receptor comprising an extracellular ligand binding domain, a transmembrane domain, and a cytotoxic signaling complex, the immune cells are genetically edited at one or more target sites in the genome of the immune cell to yield reduced levels of expression of a protein which is encoded by a gene which comprises an edited target site as compared to a non-edited immune cell, the edits result in a decrease in the frequency of cell surface expression of MHC I molecules within the population of genetically engineered immune cells, and the genetically engineered immune cells are further genetically engineered to express at least one immunosuppressive effector that exerts suppressive effects on cytotoxic activity of suppressive cells.

[0028] In several embodiments, the population of genetically engineered immune cells exhibits one or more of enhanced expansion capability, enhanced cytotoxicity against target cells, and enhanced persistence, as compared to immune cells that do not express the immunosuppressive effector and do not comprise the edited target site. In several embodiments, the population of genetically engineered immune cells comprises genetically engineered NK cells. In several embodiments, the population of genetically engineered immune cells comprises genetically engineered T cells. In several embodiments, the genetic edit is made to a gene encoding one or more of: TAPBP (Tapasin), TAP-2; UGT-1 (UGTA-1), TAPBPL (TAPBPR), TAP-1, ERp57; Calreticulin (CRT); Endoplasmic reticulum aminopeptidases ERAP1 and/or ERAP2, and/or one or more immunoproteasome components selected from the standard proteasome catalytic subunits β1, β2, and/or β5, and the inducible proteasome catalytic subunits LMP2, MECL-1, and LMP7.

[0029] Additionally, in several embodiments, there is provided a population of genetically engineered immune cells for cancer immunotherapy, comprising genetically engineered immune cells that express a cytotoxic receptor comprising an extracellular ligand binding domain, a transmembrane domain, and a cytotoxic signaling complex, wherein the immune cells are genetically edited at one or more target sites in the genome of the immune cell to yield reduced levels of expression of a protein which is encoded by a gene which comprises an edited target site as compared to a non-edited immune cell, wherein the edits result in a decrease in the frequency of cell surface expression of major histocompatibility complex class I (MHC I) molecules within the population of genetically engineered immune cells, and wherein the genetically engineered immune cells are further engineered to express at least one immunosuppressive effector, wherein the at least one immunosuppressive effector exerts suppressive effects on the cytotoxic activity of natural killer cells and/or T cells, and wherein the genetically engineered and edited immune cells exhibit one or more of enhanced expansion capability, enhanced cytotoxicity against target cells, and enhanced persistence, as compared to cells that do not comprise said immunosuppressive effector and said edited gene.

[0030] In several embodiments, there is provided a population of genetically engineered immune cells for cancer immunotherapy, comprising genetically engineered immune cells that express a cytotoxic receptor comprising an extracellular ligand binding domain, a transmembrane domain, and a cytotoxic signaling complex, wherein the immune cells are genetically edited at one or more target sites in the genome of the immune cell to yield reduced levels of expression of a protein which is encoded by a gene which comprises an edited target site as compared to a non-edited immune cell, and wherein the edits result in a decrease in the frequency of cell surface expression of MHC I molecules within the population of genetically engineered immune cells, and wherein the genetically engineered and edited immune cells exhibit one or more of enhanced expansion capability, enhanced cytotoxicity against target cells, and enhanced persistence, as compared to cells that do not comprise said edited gene.

[0031] Also provided herein is a T cell expressing a cytotoxic receptor (e.g., a chimeric antigen receptor) and comprising a genetic edit to a gene encoding antigen peptide transporter 1 (TAP-1), antigen peptide transporter 2 (TAP-2), or TAP binding protein (TAPBP).

[0032] Also provided herein is a combination of a natural killer (NK) cell and a T cell, wherein the T cell expresses a cytotoxic receptor (e.g., a chimeric antigen receptor) and comprises a genetic edit to a gene encoding TAP-1, TAP-2, or TAPBP. Also provided herein is a composition comprising a combination of NK and T cells as described herein. Also provided herein is a composition comprising a natural killer (NK) cell and a T cell, wherein the T cell expresses a cytotoxic receptor (e.g., a chimeric antigen receptor) and comprises a genetic edit to a gene encoding TAP-1, TAP-2, or TAPBP. In some embodiments, the composition comprises a pharmaceutically acceptable excipient.

[0033] In some embodiments, the NK cell expresses a cytotoxic receptor (e.g., a chimeric antigen receptor). In some embodiments, the T cell comprises a genetic edit to a gene encoding TAP-1. In some embodiments, the T cell comprises a genetic edit to the TAP1 gene. In some embodiments, the T cell comprises a genetic edit to a gene encoding TAP-2. In some embodiments, the T cell comprises a genetic edit to the TAP2 gene. In some embodiments, the T cell comprises a genetic edit to a gene encoding TAPBP. In some embodiments, the T cell comprises a genetic edit to the TAPBP gene. In some embodiments, the genetic edit reduces expression (e.g., transcription) of the gene. In some embodiments, the genetic edit eliminates (e.g., knocks out) expression of the gene.

[0034] In some embodiments, the T cell expresses a chimeric antigen receptor (CAR). In some embodiments, the NK cell expresses a chimeric antigen receptor (CAR). In some embodiments, the T cell and the NK cell express the same CAR. In some embodiments, the T cell and the NK cell express different CARs. In some embodiments, the CAR expressed by the T cell and the CAR expressed by the NK cell target the same antigen (e.g., a tumor antigen). In some embodiments, the CAR expressed by the T cell and the CAR expressed by the NK cell target different antigens (e.g., tumor antigens).

[0035] Also provided herein is use of a T cell, a combination, or a composition as described herein for use in treating a disease or disorder. In some embodiments, the disease or disorder is a cancer.

[0036] Additionally, in several embodiments, there is provided a population of genetically engineered immune cells for cancer immunotherapy, comprising a subpopulation of genetically engineered NK cells and a subpopulation of genetically engineered T cells, wherein each of the subpopulations comprise an engineered cytotoxic receptor, wherein each of the subpopulations comprises a genetic edit to a gene involved in antigen processing and/or MHC I complex assembly, resulting in a decrease in the frequency of MHC I molecules within each subpopulation, resulting in a decrease in the frequency of MHC I molecules within each subpopulation, and wherein the genetically engineered and edited immune cells exhibit one or more of enhanced expansion capability, enhanced cytotoxicity against target cells, and enhanced persistence, as compared to cells that do not comprise said edited genetic edits. In several embodiments, one or both of the subpopulations comprises a genetic edit to a gene encoding TAP-2 and/or TAPBP. In several embodiments, the genetically engineered NK cells comprise a genetic edit to a gene encoding TAP-2. In several embodiments, the genetically engineered NK cells comprise a genetic edit to a gene encoding TAPBP. In several embodiments, the genetically engineered T cells comprise a genetic edit to a gene encoding TAP-2. In several embodiments, the genetically engineered T cells comprise a genetic edit to a gene encoding TAPBP.

[0037] In several embodiments, the edits are made using an RNA-guided endonuclease. In some embodiments, the edits are made using a Crispr/Cas system. In several embodiments, the genetic edit is to a gene involved in antigen processing and/or MHC I complex assembly. In several embodiments, the genetic edit is to a gene involved in antigen processing. In several embodiments, the genetic edit is to a gene involved in MHC I complex assembly. In several embodiments, the genetic edit is to a gene involved in antigen processing and MHC I complex assembly.

[0038] In several embodiments, the suppressive cells comprise host cells. In several embodiments, the suppressive cells comprise one or more of non-engineered natural killer cells, non-engineered T cells, or suppressive engineered cells. In several embodiments, the suppressive cells comprise non-engineered natural killer cells. In several embodiments, the suppressive cells comprise non-engineered T cells. In several embodiments, the suppressive cells comprise suppressive engineered cells. In several embodiments, suppressive engineered cells comprise the genetically engineered immune cells. In several embodiments, the cells that do not comprise said immunosuppressive effector are either non-engineered or engineered cells.

[0039] In several embodiments, the genetic edit (or edits) is to one or more of UGT-1 (UGTA-1), TAPBPL (TAPBPR), TAPBP (Tapasin), TAP-1, TAP-2; ERp57; Calreticulin (CRT); Endoplasmic reticulum aminopeptidases ERAP1 and/or ERAP2, and/or one or more immunoproteasome components selected from the standard proteasome catalytic subunits β1, β2, and/or β5, and the inducible proteasome catalytic subunits LMP2, MECL-1, and/or LMP7. In several embodiments, the genetic edit is to UGT-1 (UGTA-1). In several embodiments, the genetic edit is to TAPBPL (TAPBPR). In several embodiments, the genetic edit is to TAPBP (Tapasin). In several embodiments, the genetic edit is to TAP-1. In several embodiments, the genetic edit is to TAP-2. In several embodiments, the genetic edit is to ERp57. In several embodiments, the genetic edit is to Calreticulin (CRT). In several embodiments, the genetic edit is to Endoplasmic reticulum aminopeptidases ERAP1 and/or ERAP2. In several embodiments, the genetic edit is to an immunoproteasome component selected from the group consisting of standard proteasome catalytic subunits β1, β2, and β5, and the inducible proteasome catalytic subunits LMP2, MECL-1, and LMP7.

[0040] In some embodiments, the genetic edit is to TAPBP and/or TAP2 and reduced expression of TAPBP and/or TAP2 enables the immune cells to be used in allogeneic cancer immunotherapy with reduced host versus graft rejection as compared to immune cells expressing endogenous levels of TAPBP and/or TAP2. In some embodiments, the genetic edit to TAPBP reduces expression (e.g., protein expression) of TAPBP. In some embodiments, the genetic edit to TAP2 reduces expression (e.g., protein expression) of TAP2. In some embodiments, the genetic edit reduces host versus graft rejection as compared to the absence of the genetic edit.

[0041] In several embodiments, the cytotoxic receptor targets one or more of NKG2D ligands, CD19, BCMA, CD70, and CD38 expressed by target tumor cells. In several embodiments, the cytotoxic receptor binds to a NKG2D ligand. In several embodiments, the cytotoxic receptor binds to CD19. In several embodiments, the cytotoxic receptor binds to BCMA. In several embodiments, the cytotoxic receptor binds to CD70. In several embodiments, the cytotoxic receptor binds to CD38. In several embodiments, the cytotoxic signaling complex comprises an OX40 subdomain or a 4-1BB domain, and a CD3zeta subdomain. In several embodiments, the cytotoxic signaling complex comprises an OX40 domain. In several embodiments, the cytotoxic signaling complex comprises 4-1BB domain. In several embodiments, the cytotoxic signaling complex comprises CD3zeta domain. In some embodiments, the cytotoxic signaling complex comprises an OX40 domain and a CD3zeta domain. In some embodiments, the cytotoxic signaling complex comprises a 4-1BB domain and a CD3zeta domain.

[0042] In several embodiments, the at least one immunosuppressive effector, when present, comprises a virally-derived peptide. In some embodiments, the least one immunosuppressive effector comprises a peptide derived from a retrovirus or other type of virus. In some embodiments, the least one immunosuppressive effector comprises a peptide derived from a retrovirus. In several embodiments, the at least one immunosuppressive effector comprises a peptide derived from an envelope protein of a retrovirus.

[0043] Additionally in some embodiments, the at least one immunosuppressive effector comprises at least a portion of a human protein and/or at least a portion of a human protein complex or at least a portion of human protein. In some embodiments, the at least one immunosuppressive effector comprises a human protein or portion thereof. In several embodiments, the at least one immunosuppressive effector comprises a chimeric construct comprising at least one virally-derived peptide and at least a portion of a human protein and/or at least a portion of a human protein complex.

[0044] In some embodiments, the cytotoxic receptor comprises an immunosuppressive effector. In several embodiments, the at least one immunosuppressive effector is integrated into the cytotoxic receptor. In several embodiments, the cytotoxic receptor comprises an immunosuppressive effector between the transmembrane domain and the extracellular ligand-binding domain. In several embodiments, the at least one immunosuppressive effector is integrated into the cytotoxic receptor between the transmembrane domain and the extracellular ligand-binding domain. In several embodiments, the at least one immunosuppressive effector is integrated into the cytotoxic receptor within the extracellular ligand-binding domain. In several embodiments, the cytotoxic receptor comprises an immunosuppressive effector within the extracellular ligand-binding domain. In several embodiments, the extracellular ligand-binding domain comprises an scFv. In some embodiments, the scFv comprises a heavy chain variable region (VH), a light chain variable region (VL). In some embodiments, the scFv comprises a linker between the VH and the VL. In some embodiments, the cytotoxic receptor comprises an immunosuppressive effector within the linker of the scFv. In several embodiments, the extracellular ligand-binding domain comprises an scFv and the at least one immunosuppressive effector is integrated into a linker region of the scFv. In several embodiments, the at least one immunosuppressive effector is integrated into the cytotoxic receptor within an N-terminal region of the cytotoxic receptor distally positioned from the extracellular ligand-binding domain. In several embodiments, the distal position is in relation to the membrane of the cell. In several embodiments, the at least one immunosuppressive effector is integrated into the cytotoxic receptor at a plurality of locations within an extracellular region of the cytotoxic receptor.

[0045] In several embodiments, the at least one immunosuppressive effector is bound to an extracellular membrane of the immune cells. In several embodiments, the at least one immunosuppressive effector comprises a transmembrane protein. Depending on the embodiment, the transmembrane protein is selected from CD8α, CD4, CD3ε, CD3γ, CD3δ, CD3ζ, CD28, CD137, glycophorin A, glycophorin D, nicotinic acetylcholine receptor, a GABA receptor, FcεRIγ, and a T-cell receptor. In several embodiments, the transmembrane protein comprises a CD8α transmembrane protein. In several embodiments, the at least one immunosuppressive effector is expressed on the immune cells by a disulfide trap single chain trimer (dtSCT).

[0046] In several embodiments, the immunosuppressive effector is encoded by a nucleic acid or comprises a peptide having at least 85% sequence identity to one or more of the nucleotide or amino acid sequences of SEQ ID NOs: 683-894 or 997-1000.

[0047] In several embodiments, the immunosuppressive effector comprises a peptide having at least 95% sequence identity to SEQ ID NO: 829, 997, 999, or 689. In several embodiments, the immunosuppressive effector comprises a peptide having at least 95% sequence identity to SEQ ID NO: 829. In several embodiments, the immunosuppressive effector comprises the amino acid sequence set forth in SEQ ID NO: 829. In several embodiments, the immunosuppressive effector comprises a peptide having at least 95% sequence identity to SEQ ID NO: 997. In several embodiments, the immunosuppressive effector comprises the amino acid sequence set forth in SEQ ID NO: 997. In several embodiments, the immunosuppressive effector comprises a peptide having at least 95% sequence identity to SEQ ID NO: 999. In several embodiments, the immunosuppressive effector comprises the amino acid sequence set forth in SEQ ID NO: 999. In several embodiments, the immunosuppressive effector comprises a peptide having at least 95% sequence identity to SEQ ID NO: 689. In several embodiments, the immunosuppressive effector comprises the amino acid sequence set forth in SEQ ID NO: 689.

[0048] In several embodiments, the immunosuppressive effector comprises a peptide having at least 95% sequence identity to SEQ ID NO: 1014, 1015, 1016, or 1017. In several embodiments, the immunosuppressive effector comprises a peptide having at least 95% sequence identity to SEQ ID NO: 1014. In several embodiments, the immunosuppressive effector comprises the amino acid sequence set forth in SEQ ID NO: 1014. In several embodiments, the immunosuppressive effector comprises a peptide having at least 95% sequence identity to SEQ ID NO: 1015. In several embodiments, the immunosuppressive effector comprises the amino acid sequence set forth in SEQ ID NO: 1015. In several embodiments, the immunosuppressive effector comprises a peptide having at least 95% sequence identity to SEQ ID NO: 1016. In several embodiments, the immunosuppressive effector comprises the amino acid sequence set forth in SEQ ID NO: 1016. In several embodiments, the immunosuppressive effector comprises a peptide having at least 95% sequence identity to SEQ ID NO: 1017. In several embodiments, the immunosuppressive effector comprises the amino acid sequence set forth in SEQ ID NO:1017.

[0049] In several embodiments, the immunosuppressive effector is encoded by a nucleic acid having at least 95% sequence identity to SEQ ID NO: 830, 998, 1000, or 690. In several embodiments, the immunosuppressive effector is encoded by a nucleic acid having at least 95% sequence identity to SEQ ID NO: 830. In several embodiments, the immunosuppressive effector is encoded by a nucleic acid having at least 95% sequence identity to SEQ ID NO: 998. In several embodiments, the immunosuppressive effector is encoded by a nucleic acid having at least 95% sequence identity to SEQ ID NO: 1000. In several embodiments, the immunosuppressive effector is encoded by a nucleic acid having at least 95% sequence identity to SEQ ID NO: 690.

[0050] In several embodiments, the genetically engineered immune cells comprise genetically engineered Natural Killer (NK) cells, genetically engineered T cells, or combinations thereof. In several embodiments, the genetically engineered immune cells comprise genetically engineered Natural Killer (NK) cells. In several embodiments, the genetically engineered immune cells comprise genetically engineered T cells. In several embodiments, the genetically engineered immune cells comprise genetically engineered Natural Killer (NK) cells and genetically engineered T cells. Other immune cells as disclosed herein may also be used, including, for example, iPSC-derived cells. In several embodiments, the genetically engineered immune cells are suitable for use in allogeneic cancer cell therapy with reduced risk of graft versus host disease. Advantageously, in several embodiments, the genetically engineered immune cells are suitable for use in allogeneic cancer cell therapy with reduced risk of cytotoxic activity between the genetically engineered immune cells. Optionally, in several embodiments, at least a portion of the genetically engineered immune cells are engineered to express membrane bound IL-15. In some embodiments, at least a portion of the genetically engineered NK cells are engineered to express membrane bound IL-15. In some embodiments, at least a portion of the genetically engineered T cells are engineered to express membrane bound IL-15.

[0051] Also provided for herein are methods for the treatment of cancer in a subject, comprising administering to the subject genetically engineered immune cells according to the present disclosure. Further provided is the use of genetically engineered immune cells according to the present disclosure for the treatment of cancer and/or for the preparation of a medicament for the treatment of cancer. In some embodiments, the genetically engineered cells are for use in the treatment of cancer. In some embodiments, the genetically engineered immune cells are for use in the preparation of a medicament for the treatment of cancer.

[0052] Further provided for herein is a method of manufacturing a population of genetically engineered immune cells for cancer immunotherapy, comprising contacting a population of immune cells with an RNA-guided endonuclease to genetically edit one or more target sites in the genome of the immune cell to yield reduced levels of expression of a protein which is encoded by a gene which comprises an edited target site as compared to a non-edited immune cell, wherein the edit results in a decrease in the frequency of cell surface expression of major MHC I molecules within the population of genetically engineered immune cells, contacting the population of immune cells with a polynucleotide encoding a cytotoxic receptor comprising an extracellular ligand binding domain, a transmembrane domain, and a cytotoxic signaling complex; and optionally contacting the population of immune cells with an additional polynucleotide encoding at least one immunosuppressive effector, wherein the immunosuppressive effector is encoded by a nucleic acid or comprises a peptide having at least 85% sequence identity to one or more of the nucleotide or amino acid sequences of SEQ ID NOs: 683-894 or 997-1000, wherein the at least one immunosuppressive effector exerts suppressive effects on the cytotoxic activity of suppressive cells, and wherein the genetically engineered immune cells exhibit one or more of enhanced expansion capability, enhanced cytotoxicity against target cells, and enhanced persistence, as compared to cells that do not comprise said at least one immunosuppressive effector.

[0053] In several embodiments, the genetic edit is to one or more of UGT-1 (UGTA-1), TAPBPL (TAPBPR), TAPBP (Tapasin), TAP-1, TAP-2; ERp57; Calreticulin (CRT); Endoplasmic reticulum aminopeptidases ERAP1 and/or ERAP2, and/or one or more immunoproteasome components selected from the standard proteasome catalytic subunits β1, β2, and/or β5, and the inducible proteasome catalytic subunits LMP2, MECL-1, and/or LMP7.

[0054] In several embodiments, the genetic edit comprises an edit to UGT-1 (UGTA-1). In several embodiments, the genetic edit comprises an edit to TAPBPL (TAPBPR). In several embodiments, the genetic edit comprises an edit to TAPBP (Tapasin). In several embodiments, the genetic edit comprises an edit to TAP-1. In several embodiments, the genetic edit comprises an edit to TAP-2. In several embodiments, the genetic edit comprises an edit to ERp57. In several embodiments, the genetic edit comprises an edit to Calreticulin (CRT). In several embodiments, the genetic edit comprises an edit to Endoplasmic reticulum aminopeptidases ERAP1. In several embodiments, the genetic edit comprises an edit to ERAP2. In several embodiments, the genetic edit comprises an edit to an immunoproteasome component selected from the group consisting of standard proteasome catalytic subunits β1, β2, and β5, and the inducible proteasome catalytic subunits LMP2, MECL-1, and LMP7.

[0055] In several embodiments, an additional genetic edit is made to one or more of a CISH gene, a CBLB gene, a B2M gene, a CD70 gene, an adenosine receptor gene, an NKG2A gene, a CIITA gene, a TGFBR gene, or any combination thereof. In several embodiments, an additional genetic edit comprises an edit to a gene encoding CISH. In several embodiments, an additional genetic edit comprises an edit to a gene encoding CBLB. In several embodiments, an additional genetic edit comprises an edit to a gene encoding B2M. In several embodiments, an additional genetic edit comprises an edit to a gene encoding CD70. In several embodiments, an additional genetic edit comprises an edit to a gene encoding an adenosine receptor gene. In several embodiments, an additional genetic edit comprises an edit to a gene encoding NKG2A. In several embodiments, an additional genetic edit comprises an edit to a gene encoding CIITA. In several embodiments, an additional genetic edit comprises an edit to a gene encoding TGFBR.

[0056] In some embodiments, the genetic edit is to TAPBP and/or TAP2 and reduced expression of TAPBP and/or TAP2 enables the immune cells to be used in allogeneic cancer immunotherapy with reduced host versus graft rejection as compared to immune cells expressing endogenous levels of TAPBP and/or TAP2. In some embodiments, the genetic edit to TAPBP reduces expression (e.g., protein expression) of TAPBP. In some embodiments, the genetic edit to TAP2 reduces expression (e.g., protein expression) of TAP2. In some embodiments, the genetic edit reduces host versus graft rejection as compared to the absence of the genetic edit.

[0057] In several embodiments, the immunosuppressive effector is encoded by a nucleic acid or comprises a peptide having at least 85% sequence identity to one or more of the nucleotide or amino acid sequences of SEQ ID NOs: 683-894, or 997-1000 wherein the immunosuppressive effector comprises at least a portion of an HLA-E molecule, and/or wherein the immunosuppressive effector comprises at least a portion of CD47. In several embodiments, the immunosuppressive effector is encoded by a nucleic acid or comprises a peptide having at least 85% sequence identity to sequence set forth in any one of SEQ ID NOs: 683-894 and 997-1000. In several embodiments, the immunosuppressive effector comprises HLA-E or a portion thereof. In several embodiments, the immunosuppressive effector comprises CD47 or a portion thereof.

[0058] In several embodiments, HLA can be re-expressed, for example by expressing HLA-E and/or HLA-G. In several embodiments, the re-expression of the HLA is accomplished using a disulfide trap single chain trimer (dtSCT) to express HLA-E and/or HLA-G and, optionally, an immunosuppressive peptide, as well as B2M. In several embodiments, the re-expression of the HLA is accomplished using a disulfide trap single chain trimer (dtSCT) to express HLA-E. In several embodiments, the re-expression of the HLA is accomplished using a disulfide trap single chain trimer (dtSCT) to express HLA-G. In some embodiments, the re-expression of the HLA is accomplished using a disulfide trap single chain trimer (dtSCT) to express an immunosuppressive peptide. In some embodiments, the re-expression of the HLA is accomplished using a disulfide trap single chain trimer (dtSCT) to express B2M.

[0059] Provided for herein, in several embodiments, is a polynucleotide encoding a chimeric immunosuppressive construct comprising an HLA-G peptide, mature B2M and mature HLA-E. In several embodiments, such a construct comprises one or more linkers. In several embodiments, the immunosuppressive construct comprises a B2M signal peptide (at least about 85%, at least about 90%, at least about 94%, at least about 95%, at least about 96%, at least about 97%, at least about 98%, or at least about 99%, identical to SEQ ID NO: 1003) In several embodiments, the immunosuppressive construct comprises a B2M signal peptide (at least about 85%, at least about 90%, at least about 94%, at least about 95%, at least about 96%, at least about 97%, at least about 98%, or at least about 99%, identical to SEQ ID NO: 1018), an HLA-G peptide (amino acids 3-11 of HLA-G; at least about 85%, at least about 90%, at least about 94%, at least about 95%, at least about 96%, at least about 97%, at least about 98%, or at least about 99%, identical to SEQ ID NO: 1005), a disulfide-bridge containing linker (e.g., a GS linker comprising at least two cysteine residues; at least about 85%, at least about 90%, at least about 94%, at least about 95%, at least about 96%, at least about 97%, at least about 98%, or at least about 99%, identical to SEQ ID NO: 1009 or 1007), a mature B2M domain (at least about 85%, at least about 90%, at least about 94%, at least about 95%, at least about 96%, at least about 97%, at least about 98%, or at least about 99%, identical to SEQ ID NO: 1011), an additional linker (e.g., a GS linker; at least about 85%, at least about 90%, at least about 94%, at least about 95%, at least about 96%, at least about 97%, at least about 98%, or at least about 99%, identical to SEQ ID NO: 1009 or 1007), and a mature HLA-E domain (at least about 85%, at least about 90%, at least about 94%, at least about 95%, at least about 96%, at least about 97%, at least about 98%, or at least about 99%, identical to SEQ ID NO: 1013).

[0060] In several embodiments, the HLA re-expressing construct is encoded by a polynucleotide that encodes an amino acid sequence comprising SEQ ID NO: 829, 997, or 999. In several embodiments, the amino acid sequence shares at least about 90%, at least about 94%, at least about 95%, at least about 96%, at least about 97%, at least about 98%, or at least about 99%, sequence identity, homology and/or functional equivalence with SEQ ID NO: 829, 997, or 999. In several embodiments, the HLA re-expressing construct comprises the amino acid sequence set forth in SEQ ID NO: 829, 997, or 999. In several embodiments, the HLA re-expressing construct comprises the amino acid sequence set forth in SEQ ID NO: 829. In several embodiments, the HLA re-expressing construct comprises the amino acid sequence set forth in SEQ ID NO: 997. In several embodiments, the HLA re-expressing construct comprises the amino acid sequence set forth in SEQ ID NO: 999.

[0061] In several embodiments, the HLA re-expressing construct is encoded by a polynucleotide that encodes an amino acid sequence comprising SEQ ID NO: 1014, 1015, or 1016. In several embodiments, the amino acid sequence shares at least about 90%, at least about 94%, at least about 95%, at least about 96%, at least about 97%, at least about 98%, or at least about 99%, sequence identity, homology and/or functional equivalence with SEQ ID NO: 1014, 1015, or 1016. In several embodiments, the HLA re-expressing construct comprises the amino acid sequence set forth in SEQ ID NO: 1014, 1015, or 1016. In several embodiments, the HLA re-expressing construct comprises the amino acid sequence set forth in SEQ ID NO: 1014. In several embodiments, the HLA re-expressing construct comprises the amino acid sequence set forth in SEQ ID NO: 1015. In several embodiments, the HLA re-expressing construct comprises the amino acid sequence set forth in SEQ ID NO: 1016.

[0062] In several embodiments, the B2M signal peptide is encoded by a nucleic acid that is at least about 85%, at least about 90%, at least about 94%, at least about 95%, at least about 96%, at least about 97%, at least about 98%, or at least about 99%, identical to SEQ ID NO: 1001 or 1002. In some embodiments, the B2M signal peptide comprises the amino acid sequence set forth in SEQ ID NO: 1003. In some embodiments, the B2M signal peptide comprises the amino acid sequence set forth in SEQ ID NO: 1018.

[0063] In several embodiments, the HLA-G peptide is encoded by a nucleic acid that is at least about 85%, at least about 90%, at least about 94%, at least about 95%, at least about 96%, at least about 97%, at least about 98%, or at least about 99%, identical to SEQ ID NO: 1004. In some embodiments, the HLA-G peptide comprises the amino acid sequence set forth in SEQ ID NO: 1005.

[0064] In several embodiments, the disulfide-bridge containing linker is encoded by a nucleic acid that is at least about 85%, at least about 90%, at least about 94%, at least about 95%, at least about 96%, at least about 97%, at least about 98%, or at least about 99%, identical to SEQ ID NO: 1008 or 1006. In several embodiments, the disulfide-bridge continaing linker comprises the amino acid sequence set forth in SEQ ID NO: 1007 or 1009. In several embodiments, the disulfide-bridge continaing linker comprises the amino acid sequence set forth in SEQ ID NO: 1007. In several embodiments, the disulfide-bridge continaing linker comprises the amino acid sequence set forth in SEQ ID NO: 1009.

[0065] In several embodiments, the mature B2M is encoded by a nucleic acid that is at least about 85%, at least about 90%, at least about 94%, at least about 95%, at least about 96%, at least about 97%, at least about 98%, or at least about 99%, identical to SEQ ID NO: 1010. In several embodiments, the mature B2M comprises the amino acid sequence set forth in SEQ ID NO: 1011.

[0066] In several embodiments, an additional copy of the disulfide-bridge containing linker is use after the B2M and links the B2M with a mature HLA-E domain.

[0067] In several embodiments, the mature HLA-E domain is encoded by a nucleic acid that is at least about 85%, at least about 90%, at least about 94%, at least about 95%, at least about 96%, at least about 97%, at least about 98%, or at least about 99%, identical to SEQ ID NO: 1012. In several embodiments, the mature HLA-E domain comprises the amino acid sequence set forth in SEQ ID NO:1013.

[0068] Also provided for herein is a method of manufacturing a population of genetically engineered immune cells for cancer immunotherapy, comprising contacting a population of immune cells with an RNA-guided endonuclease to genetically edit one or more target sites in the genome of the immune cell to yield reduced levels of expression of a protein which is encoded by a gene which comprises an edited target site as compared to a non-edited immune cell, wherein the edit results in a decrease in the frequency of cell surface expression of MHC I molecules within the population of genetically engineered immune cells, contacting the population of immune cells with an additional polynucleotide encoding at least one immunosuppressive effector, wherein the immunosuppressive effector is encoded by a nucleic acid or comprises a peptide having at least 85% sequence identity to one or more of the nucleotide or amino acid sequences of SEQ ID NOs: 683-894 or 997-1000, wherein the at least one immunosuppressive effector exerts suppressive effects on the cytotoxic activity of suppressive cells, and wherein the genetically engineered immune cells exhibit one or more of enhanced expansion capability, enhanced cytotoxicity against target cells, and enhanced persistence, as compared to cells that do not comprise said at least one immunosuppressive effector.

[0069] Provided for herein is also a method of enhancing the persistence of immune cells for use in allogeneic therapy, comprising contacting a population of immune cells with an RNA-guided endonuclease to genetically edit one or more target sites in the genome of the immune cell to yield reduced levels of expression of a protein which is encoded by a gene which comprises an edited target site as compared to a non-edited immune cell, wherein the edit results in a decrease in the frequency of cell surface expression of MHC I molecules within the population of genetically engineered immune cells, and wherein the genetically edited immune cells are less likely to trigger cytotoxic effects from one or more of host NK or T cells, thereby exhibiting enhanced persistence, as compared to cells that do not comprise said gene edit.

[0070] An additional method of enhancing the persistence of immune cells for use in allogeneic therapy is provided and comprises contacting a population of immune cells with an RNA-guided endonuclease to genetically edit one or more target sites in the genome of the immune cell to yield reduced levels of expression of a protein which is encoded by a gene which comprises an edited target site as compared to a non-edited immune cell, wherein the edit is to a gene involved in antigen processing and/or MHC I complex assembly, and wherein the genetically edited immune cells are less likely to trigger cytotoxic effects from one or more of host NK or T cells, thereby exhibiting enhanced persistence, as compared to cells that do not comprise said gene edit.

[0071] In several embodiments, the genetic edit is to one or more of UGT-1 (UGTA-1), TAPBPL (TAPBPR), TAPBP (Tapasin), TAP-1, TAP-2; ERp57; Calreticulin (CRT); Endoplasmic reticulum aminopeptidases ERAP1 and/or ERAP2, and/or one or more immunoproteasome components selected from the standard proteasome catalytic subunits β1, β2, and/or β5, and the inducible proteasome catalytic subunits LMP2, MECL-1, and/or LMP7. In several embodiments, the genetic edit comprises an edit to UGT-1 (UGTA-1). In several embodiments, the genetic edit comprises an edit to TAPBPL (TAPBPR). In several embodiments, the genetic edit comprises an edit to TAPBP (Tapasin). In several embodiments, the genetic edit comprises an edit to TAP-1. In several embodiments, the genetic edit comprises an edit to TAP-2. In several embodiments, the genetic edit comprises an edit to ERp57. In several embodiments, the genetic edit comprises an edit to Calreticulin (CRT). In several embodiments, the genetic edit comprises an edit to Endoplasmic reticulum aminopeptidases ERAP1. In several embodiments, the genetic edit comprises an edit to ERAP2. In several embodiments, the genetic edit comprises an edit to an immunoproteasome component selected from the group consisting of standard proteasome catalytic subunits β1, β2, and β5, and the inducible proteasome catalytic subunits LMP2, MECL-1, and LMP7. In several embodiments, an additional genetic edit is made to one or more of a CISH gene, a CBLB gene, a B2M gene, a CD70 gene, an adenosine receptor gene, an NKG2A gene, a CIITA gene, a TGFBR gene, or any combination thereof. In several embodiments, the genetic edit comprises an edit to CISH. In several embodiments, the genetic edit comprises an edit to CBLB. In several embodiments, the genetic edit comprises an edit to B2M. In several embodiments, the genetic edit comprises an edit to CD70. In several embodiments, the genetic edit comprises an edit to an adenosine receptor gene. In several embodiments, the genetic edit comprises an edit to NKG2A. In several embodiments, the genetic edit comprises an edit to CIITA. In several embodiments, the genetic edit comprises an edit to TGFBR.

[0072] In several embodiments, the methods further comprise contacting the population of immune cells with a polynucleotide encoding a cytotoxic receptor. In several embodiments, the methods further comprise contacting the population of immune cells with a polynucleotide encoding a cytotoxic receptor comprising an extracellular ligand binding domain, a transmembrane domain, and a cytotoxic signaling complex. Depending on the embodiment, the population of immune cells comprises NK cells, T cells and/or NK and T cells.

[0073] Some embodiments relate to a method comprising administering an immune cell as described herein to a subject in need. In some embodiments, the immune cells are allogeneic to the subject. In several embodiments, the immune cells are obtained from a subject without a cancer. In some embodiments, the subject has cancer. In some embodiments, the administration treats, inhibits, or prevents progression of the cancer.

### BRIEF DESCRIPTION OF THE DRAWINGS

[0074] FIG. 1 depicts non-limiting examples of tumor-directed chimeric antigen receptors.

[0075] FIG. 2 depicts additional non-limiting examples of tumor-directed chimeric antigen receptors.

[0076] FIG. 3 depicts additional non-limiting examples of tumor-directed chimeric antigen receptors.

[0077] FIG. 4 depicts additional non-limiting examples of tumor-directed chimeric antigen receptors.

[0078] FIG. 5 depicts additional non-limiting examples of tumor-directed chimeric antigen receptors.

[0079] FIG. 6 depicts non-limiting examples of tumor-directed chimeric antigen receptors directed against non-limiting examples of tumor markers.

[0080] FIG. 7 depicts additional non-limiting examples of tumor-directed chimeric antigen receptors directed against non-limiting examples of tumor markers.

[0081] FIGS. 8A-8I schematically depict various pathways that are altered through the gene editing techniques disclosed herein. FIG. 8A shows a schematic of the inhibitory effects of TGF-beta release by tumor cells in the tumor microenvironment. FIG. 8B shows a schematic of the CIS/CISH negative regulatory pathways on IL-15 function. FIG. 8C depicts a non-limiting schematic process flow for generation of engineered non-alloreactive T cells and engineered NK cells for use in a combination therapy according to several embodiments disclosed herein. FIG. 8D shows a schematic of the signaling pathways that can lead to graft vs. host disease. FIG. 8E shows a schematic of how several embodiments disclosed herein can reduce and/or eliminate graft vs. host disease. FIG. 8F shows a schematic of the signaling pathways that can lead to host vs. graft rejection. FIG. 8G shows a schematic of several embodiments disclosed herein that can reduce and/or eliminate host vs. graft rejection. FIG. 8H shows a schematic of how edited immune cells can act against other edited immune cells in mixed cell product. FIG. 8I shows a schematic of how several embodiments disclosed herein can reduce and/or eliminate host immune effects against edited immune cells.

[0082] FIGS. 9A-9D show schematic depictions of non-limiting modifications made to CARs according to embodiments disclosed herein. FIG. 9A shows a non-limiting embodiment in which a single immunosuppressive effector is integrated into the hinge domain of the CAR. FIG. 9B shows a non-limiting embodiment in which multiple domains are integrated into the CAR, with a first immunosuppressive effector being of a different type than a second immunosuppressive effector. In some embodiments, a plurality of immunosuppressive effectors is included (e.g., 2, 3, 4, 5 or more), with the immunosuppressive effectors optionally being the same, or different, from any other immunosuppressive effector in the CAR. FIG. 9C shows a non-limiting embodiment wherein the immunosuppressive effector is positioned the target binding region (e.g., on the linker between the heavy and light chains of an scFv). FIG. 9D shows a non-limiting embodiment wherein the immunosuppressive effector is positioned at the N-terminus of a chimeric antigen receptor.

[0083] FIGS. 10A-10J show schematic depictions of non-limiting modifications made to immune cells, which are optionally allogeneic immune cells. FIG. 10A shows an immune cell engineered to express an immunosuppressive effector in a membrane-bound format, based on being tethered to a transmembrane protein (or fragment thereof). FIG. 10B shows an immune cell engineered to express multiple immunosuppressive effectors in a membrane-bound format. FIG. 10C shows an immune cell engineered to express multiple immunosuppressive effectors in a membrane-bound format, with each of the two effectors differing from one another. FIG. 10D shows an immune cell engineered to express multiple immunosuppressive effectors tethered to a single transmembrane protein. FIG. 10E shows an immune cell engineered to express multiple immunosuppressive effectors tethered to a single transmembrane protein, wherein the domains differ from one another. FIG. 10F shows an immune cell engineered to express multiple immunosuppressive effectors in a membrane-bound format, with each of the two effectors tethered to one of the transmembrane proteins differing from one another. FIG. 10G shows an immune cell engineered to express a membrane-bound immunosuppressive effector, as well as a CAR comprising one or more immunosuppressive effectors (though in some embodiments the CAR does not include an immunosuppressive effector domain). FIG. 10H shows an immune cell engineered to express two immunosuppressive effectors in a membrane-bound format, as well as a CAR comprising one or more immunosuppressive effectors. FIG. 10I shows an immune cell engineered to express a membrane-bound immunosuppressive effector, a CAR comprising one or more immunosuppressive effectors, and one or more of HLA-E and/or HLA-G. In some embodiments like that schematically depicted, the engineered cells are NK cells that have been gene edited to disrupt B2M expression. FIG. 10J shows an immune cell engineered to express multiple immunosuppressive effectors, a CAR comprising at least one immunosuppressive effector, as well as HLA-E, HLA-G, CD47, PD-L1, and/or the Poliovirus Receptor (PVR). While all are depicted on a single cell, any combination of the immunosuppressive effectors, or any one alone, shown in the Figures or disclosed herein, may be used.

[0084] FIGS. 11A-11JJ depict schematics of non-limiting embodiments of immunosuppressive effector constructs as provided for herein.

[0085] FIG. 12 depicts a non-limiting schematic of an immune cell engineered to express a chimeric UL18-B2M construct.

[0086] FIGS. 13A-13B depict schematic diagrams related to constructs disclosed herein. FIG. 13A shows a schematic diagram of various scenarios in which immunosuppression edits or constructs are made and the resultant self versus non-self outcome. FIG. 13B shows a schematic of a disulfide trap single chain trimer (dtSCT) used to express various immune evasion peptides (modified from Hansen et al. Current Protocols in Immunology, 2009).

[0087] FIG. 14 shows a schematic of the pathways by which HLA-E acts on NK cells.

[0088] FIGS. 15A-15B show schematics of various approaches to reduce immune responses against engineered therapeutic cells. FIG. 15A depicts a schematic of a CAR comprising a hypoimmune domain (HYPO) and various peptides or HLA sequences that are used to reduce immune responses against engineered therapeutic cells. FIG. 15B depicts various peptides and combinations of peptides that are used to reduce immune responses against engineered therapeutic cells.

[0089] FIG. 16 shows a non-limiting schematic of an experimental timeline for evaluation of the genetic modifications to NK and/or T cells.

[0090] FIGS. 17A-17D show data related to the expression of MHC I expression on T cells genetically edited at one or more non-limiting examples of target genes. FIG. 17A shows flow cytometry data for expression of selected genes by T cells from a first donor at five days after gene disruption. FIG. 17B shows the data of FIG. 17A tabulated. FIG. 17C shows flow cytometry data for expression of selected genes by T cells from a second donor at seven days after gene disruption. FIG. 17D shows the data of FIG. 17C tabulated.

[0091] FIGS. 18A-18D show data related to the expression of MHC I expression on T cells genetically edited at one or more non-limiting examples of target genes. FIG. 18A shows flow cytometry data for expression of selected genes by T cells from a first donor at nine days after gene disruption. FIG. 18B shows the data of FIG. 18A tabulated. FIG. 18C shows flow cytometry data for expression of selected genes by T cells from a second donor at nine days after gene disruption. FIG. 18D shows the data of FIG. 18C tabulated.

[0092] FIGS. 19A-19B show data assessing the editing of the indicated target genes. FIG. 19A shows agarose gel electrophoresis of DNA amplified from electroporated (EP) control T cells as compared to T cells edited at the indicated target gene. FIG. 19B shows similar data for other examples of target genes.

[0093] FIGS. 20A-20C show data related to the reduced expression of selected target genes in a first donor's T cells, the resultant HLA expression levels, and the percentages of NK cells and T cells present after one day of co-culturing the edited T cells with NK cells expressing a chimeric antigen receptor. FIG. 20A shows flow cytometry data for expression of selected genes by T cells from a first donor after gene disruption. FIG. 20B shows the data of FIG. 20A tabulated. FIG. 20C shows histograms showing the percentage of T cells and NK cells present in a cultured population one day after co-culturing.

[0094] FIGS. 21A-21C show data related to the reduced expression of selected target genes in a second donor's T cells, the resultant HLA expression levels, and the percentages of NK cells and T cells present after one day of co-culturing the edited T cells with NK cells expressing a chimeric antigen receptor. FIG. 21A shows flow cytometry data for expression of selected genes by T cells from a second donor after gene disruption. FIG. 21B shows the data of FIG. 21A tabulated. FIG. 21C shows histograms showing the percentage of T cells and NK cells present in a cultured population one day after co-culturing.

[0095] FIGS. 22A-22C show data related to the reduced expression of selected target genes in a first donor's T cells, the resultant HLA expression levels, and the percentages of NK cells and T cells present after three days of co-culturing the edited T cells with NK cells expressing a chimeric antigen receptor. FIG. 22A shows flow cytometry data for expression of selected genes by T cells from a first donor after gene disruption. FIG. 22B shows the data of FIG. 22A tabulated. FIG. 22C shows histograms showing the percentage of T cells and NK cells present in a cultured population three days after co-culturing.

[0096] FIGS. 23A-23C show data related to the reduced expression of selected target genes in a second donor's T cells, the resultant HLA expression levels, and the percentages of NK cells and T cells present after three days of co-culturing the edited T cells with NK cells expressing a chimeric antigen receptor. FIG. 23A shows flow cytometry data for expression of selected genes by T cells from a second donor after gene disruption. FIG. 23B shows the data of FIG. 23A tabulated. FIG. 23C shows histograms showing the percentage of T cells and NK cells present in a cultured population three days after co-culturing.

[0097] FIGS. 24A-24C show survival curves for T cells that are edited at the indicated target gene (or electroporation only (EP)) and cocultured with NK cells at the indicated NK:T ratio. FIG. 24A shows survival of T cells after co-culturing at a 2:1 NK:T cell ratio. FIG. 24B shows survival of T cells after co-culturing at a 1:1 NK:T cell ratio. FIG. 24C shows survival of T cells after co-culturing at a 1:2 NK:T cell ratio.

[0098] FIG. 25 shows a schematic of antigen processing, loading of MHC molecules and transport to the cell surface for antigen presentation.

[0099] FIGS. 26A-26C depict schematics of non-limiting embodiments of immunosuppressive effector constructs as provided for herein.

### DETAILED DESCRIPTION

[0100] Some embodiments of the methods and compositions provided herein relate to engineered immune cells and combinations of the same for use in immunotherapy. In several embodiments, the engineered cells are engineered in multiple ways, for example, to express a cytotoxicity-inducing receptor complex. As used herein, the term “cytotoxic receptor complexes” shall be given its ordinary meaning and shall also refer to (unless otherwise indicated), Chimeric Antigen Receptors (CAR), chimeric receptors (also called activating chimeric receptors in the case of NKG2D chimeric receptors). In several embodiments, the cells are further engineered to achieve a modification of the reactivity of the cells against non-tumor tissue. Several embodiments relate to the modification of T cells, through various genetic engineering methodologies, such that the resultant T cells have reduced and/or eliminated alloreactivity. Such non-alloreactive T cells can also be engineered to express a chimeric antigen receptor (CAR) that enables the non-alloreactive T cells to impart cytotoxic effects against tumor cells. In several embodiments, natural killer (NK) cells are also engineered to express a cytotoxicity-inducing receptor complex (e.g., a chimeric antigen receptor or chimeric receptor).

[0101] While autologous CAR T cell therapies have been developed and shown to exhibit substantial in vivo persistence and efficacy, the majority of patients treated with autologous CAR T cell therapy will experience cytokine release syndrome (CRS) or a neurotoxicity. Further, autologous CAR T cell therapies face numerous challenges, including the need to leukapherese and then manufacture a conforming CAR T cell product from patients who are often extremely sick, heavily pre-treated, or both. Manufacturing sufficient numbers of CAR T cells from such patients can be difficult, or in some cases, impossible. In addition, a potential patient may not survive the length of time it takes to manufacture the final CAR T cell product from the T cells obtained from the patient.

[0102] Allogeneic CAR T cell therapies manufactured from healthy donors can obviate many of these challenges. For example, manufacturing success rates for allogeneic CAR T cells may be higher due to better quality of incoming donor T cells. Allogeneic CAR T cell therapies can also be provided when a patient is in need, without having to wait for the patient's own cells to be manufactured. Thus, allogeneic CAR T cell therapies are being investigated for use as off-the-shelf products.

[0103] Despite the challenges that allogeneic CAR T cells may overcome, they are associated with their own set of obstacles. Specifically, allogeneic T cells can result in graft versus host disease (GvHD) or host versus graft disease (HvGD) due to the immunologic mismatch between donor cells and recipient patient cells. Solutions are therefore needed to overcome such challenges. In some cases, T cells are edited to eliminate cell surface expression of HLA class I molecules, such as by knocking out beta-2 microglobulin (B2M), which can reduce host T cell-mediated graft rejection. However, this approach can render administered cells (e.g., T cells) susceptible to graft rejection mediated by host and/or administered NK cells. Thus, alternative approaches are needed, particularly for cell therapy compositions comprising both NK and T cells. It is observed herein that knockout of genes associated with the secretory pathway by which peptide-loaded HLA molecules are transported to the plasma membrane of the cell. For example, observations described herein demonstrate that knockout of TAP-2 or TAPBP reduced, but did not eliminate, HLA I expression in T cell populations. Specifically, the amount of HLA I expressed by each of the T cells was reduced, despite nearly 100% of the population still expressing some amount of HLA I. By contrast, B2M knockout resulted in fewer cells actually expressing HLA I, but those that did still express HLA I expressed it near unedited levels. It was surpisingly observed that T cells knocked out for TAP-2 or TAPBP were maintained at a higher percentage in co-culture with NK cells, as compared to T cells knocked out for B2M in co-culture with NK cells. Thus, knock out of TAP-2 or TAPBP in T cells increased their persistence as compared to knockout of B2M, when present in combination with NK cells.

[0104] In several embodiments, combinations of these engineered immune cell types (e.g., NK and T cells) are used in immunotherapy, which results in both a rapid (NK-cell based) and persistent (T-cell based) anti-tumor effect, all while advantageously having little to no graft versus host disease. Some embodiments include methods of use of the compositions or cells in immunotherapy.

[0105] The term “anticancer effect” refers to a biological effect which can be manifested by various means, including but not limited to, a decrease in tumor volume, a decrease in the number of cancer cells, a decrease in the number of metastases, an increase in life expectancy, decrease in cancer cell proliferation, decrease in cancer cell survival, and/or amelioration of various physiological symptoms associated with the cancerous condition.

### Cell Types

[0106] Some embodiments of the methods and compositions provided herein relate to a cell such as an immune cell. In some embodiments, a T cell is engineered to express a chimeric receptor that binds to an antigen (e.g., an antigen expressed by a cancer cell). For example, an immune cell, such as a T cell, may be engineered to include a chimeric receptor such as a CD19-directed chimeric receptor, or engineered to include a nucleic acid encoding said chimeric receptor as described herein. In some embodiments, a NK cell is engineered to express a chimeric receptor that binds to an antigen (e.g., an antigen expressed by a cancer cell). Additional embodiments relate to engineering a second set of cells (e.g., NK cells) to express another cytotoxic receptor complex, such as an NKG2D chimeric receptor complex as disclosed herein. Thus, in some embodiments, combinations or compositions comprising both engineered T cells and engineered NK cells are contemplated. In some embodiments, the engineered T cells and the engineered NK cells express the same chimeric receptor. In some embodiments, the engineered T cells and the engineered NK cells express different chimeric receptors. In some embodiments, the engineered T cells and the engineered NK cells express chimeric receptors that bind to the same antigen (e.g., different epitopes of the same antigen). In some embodiments, the engineered T cells and the engineered NK cells express chimeric receptors that binds different antigens.

[0107] Still additional embodiments relate to the further genetic manipulation of T cells (e.g., donor T cells) to reduce, disrupt, minimize and/or eliminate the ability of the donor T cell to be alloreactive against recipient cells (graft versus host disease). For example, in some embodiments, T cells are engineered to reduce alloreactivity against recipient cells.

[0108] Traditional anti-cancer therapies relied on a surgical approach, radiation therapy, chemotherapy, or combinations of these methods. As research led to a greater understanding of some of the mechanisms of certain cancers, this knowledge was leveraged to develop targeted cancer therapies. Targeted therapy is a cancer treatment that employs certain drugs that target specific genes or proteins found in cancer cells or cells supporting cancer growth, (like blood vessel cells) to reduce or arrest cancer cell growth. More recently, genetic engineering has enabled approaches to be developed that harness certain aspects of the immune system to fight cancers. In some cases, a patient's own immune cells are modified to specifically eradicate that patient's type of cancer. Various types of immune cells can be used, such as T cells, Natural Killer (NK cells), or combinations thereof, as described in more detail below.

[0109] To facilitate cancer immunotherapies, there are provided for herein polynucleotides, polypeptides, and vectors that encode chimeric antigen receptors (CAR) that comprise a target binding moiety (e.g., an extracellular binder of a ligand, or a tumor marker-directed chimeric receptor, expressed by a cancer cell) and a cytotoxic signaling complex. For example, some embodiments include a polynucleotide, polypeptide, or vector that encodes, for example a chimeric antigen receptor directed against a tumor marker, for example, CD19, CD123, CD70, Her2, mesothelin, Claudin 6, BCMA, EGFR, among others, to facilitate targeting of an immune cell to a cancer and exerting cytotoxic effects on the cancer cell. Also provided are engineered immune cells (e.g., T cells or NK cells) expressing such CARs. In some embodiments, a chimeric antigen receptor binds to ligands of NKG2D. In some embodiments, a chimeric antigen receptor binds to CD19. In some embodiments, a chimeric antigen receptor binds to CD70. There are also provided herein, in several embodiments, polynucleotides, polypeptides, and vectors that encode a construct comprising an extracellular domain comprising two or more subdomains, e.g., first CD19-targeting subdomain comprising a CD19 binding moiety as disclosed herein and a second subdomain comprising a C-type lectin-like receptor and a cytotoxic signaling complex. Also provided are engineered immune cells (e.g., T cells or NK cells) expressing such bi-specific constructs. Methods of treating cancer and other uses of such cells for cancer immunotherapy are also provided for herein.

[0110] To facilitate cancer immunotherapies, there are also provided for herein polynucleotides, polypeptides, and vectors that encode chimeric receptors that comprise a target binding moiety (e.g., an extracellular binder of a ligand expressed by a cancer cell) and a cytotoxic signaling complex. For example, some embodiments include a polynucleotide, polypeptide, or vector that encodes, for example an activating chimeric receptor comprising an NKG2D extracellular domain that is directed against a tumor marker, for example, MICA, MICB, ULBP1, ULBP2, ULBP3, ULBP4, ULBP5, and ULBP6, among others, to facilitate targeting of an immune cell to a cancer and exerting cytotoxic effects on the cancer cell. In some embodiments, the chimeric receptor comprises an extracellular domain of NKG2D. Also provided are engineered immune cells (e.g., T cells or NK cells) expressing such chimeric receptors. There are also provided herein, in several embodiments, polynucleotides, polypeptides, and vectors that encode a construct comprising an extracellular domain comprising two or more subdomains, e.g., first and second ligand binding receptor and a cytotoxic signaling complex. Also provided are engineered immune cells (e.g., T cells or NK cells) expressing such bi-specific constructs (in some embodiments the first and second ligand binding domain target the same ligand). Methods of treating cancer and other uses of such cells for cancer immunotherapy are also provided for herein.

### Engineered Cells for Immunotherapy

[0111] In several embodiments, cells of the immune system are engineered to have enhanced cytotoxic effects against target cells, such as tumor cells. For example, a cell of the immune system may be engineered to include a tumor-directed chimeric receptor and/or a tumor-directed CAR as described herein. In several embodiments, white blood cells or leukocytes, are used, since their native function is to defend the body against growth of abnormal cells and infectious disease. There are a variety of types of white bloods cells that serve specific roles in the human immune system, and are therefore a preferred starting point for the engineering of cells disclosed herein. White blood cells include granulocytes and agranulocytes (presence or absence of granules in the cytoplasm, respectively). Granulocytes include basophils, eosinophils, neutrophils, and mast cells. Agranulocytes include lymphocytes and monocytes. Cells such as those that follow or are otherwise described herein may be engineered to include a chimeric receptor, such as an NKG2D chimeric receptor, and/or a CAR, such as a CD19-directed CAR, or a nucleic acid encoding the chimeric receptor or the CAR. In several embodiments, the cells are optionally engineered to co-express a membrane-bound interleukin 15 (mbIL15) co-stimulatory domain. In some embodiments, the immune cells engineered to express a chimeric receptor are engineered to bicistronically express a mbIL15 domain. As discussed in more detail below, in several embodiments, the cells, particularly T cells, are further genetically modified to reduce and/or eliminate the alloreactivity of the cells.

### Monocytes for Immunotherapy

[0112] In some embodiments, the immune cells comprise monocytes. Monocytes are a subtype of leukocyte. Monocytes can differentiate into macrophages and myeloid lineage dendritic cells. Monocytes are associated with the adaptive immune system and serve the main functions of phagocytosis, antigen presentation, and cytokine production. Phagocytosis is the process of uptake of cellular material, or entire cells, followed by digestion and destruction of the engulfed cellular material.

[0113] In some embodiments, a monocyte is positive for cell surface expression of a marker selected from among the group consisting of CCR2, CCR5, CD11c, CD14, CD16, CD62L, CD68+, CX3CR1, HLA-DR, or any combination thereof. In some embodiments, a monocyte is positive for cell surface expression of CD14. In some embodiments, a monocyte is positive for cell surface expression of CCR2. In some embodiments, a monocyte is positive for cell surface expression of CCR5. In some embodiments, a monocyte is positive for cell surface expression of CD62L.

[0114] In several embodiments, monocytes are used in connection with one or more additional engineered cells as disclosed herein. Some embodiments of the methods and compositions described herein relate to a monocyte that includes a tumor-directed CAR, or a nucleic acid encoding the tumor-directed CAR. In some embodiments, the monocytes express a CAR that binds to a tumor antigen, for example, CD19, CD123, CD70, Her2, mesothelin, Claudin 6, BCMA, or EGFR.

[0115] In some embodiments, the monocytes are engineered to a membrane-bound interleukin 15 (mbIL15) domain. In some embodiments, the monocytes engineered to express a chimeric receptor are also engineered to also express (e.g., bicistronically express) a membrane-bound interleukin 15 (mbIL15) domain. Thus, in some embodiments, the monocytes are engineered to bicistronically express the chimeric receptor and mbIL15. Several embodiments of the methods and compositions disclosed herein relate to monocytes engineered to express a CAR that targets a tumor marker, for example, CD19, CD123, CD70, Her2, mesothelin, Claudin 6, BCMA, EGFR, among any of the others disclosed herein, and a membrane-bound interleukin 15 (mbIL15) co-stimulatory domain. Several embodiments of the methods and compositions disclosed herein relate to monocytes engineered to express an activating chimeric receptor that targets a ligand on a tumor cell, for example, MICA, MICB, ULBP1, ULBP2, ULBP3, ULBP4, ULBP5, and ULBP6 (among others) and optionally a membrane-bound interleukin 15 (mbIL15) co-stimulatory domain.

[0116] In some embodiments, the monocytes are allogeneic cells. In some embodiments, the monocytes are obtained from a donor who does not have cancer.

### Lymphocytes for Immunotherapy

[0117] In some embodiments, the immune cells comprise lymphocytes. Lymphocytes, the other primary sub-type of leukocyte include T cells (cell-mediated, cytotoxic adaptive immunity), natural killer cells (cell-mediated, cytotoxic innate immunity), and B cells (humoral, antibody-driven adaptive immunity). While B cells are engineered according to several embodiments, disclosed herein, several embodiments also relate to engineered T cells or engineered NK cells (mixtures of T cells and NK cells are used in some embodiments, either from the same donor, or different donors). Thus, in some embodiments, the immune cells comprise T cells. In some embodiments, the immune cells comprise NK cells. In some embodiments, the immune cells comprise T cells and NK cells. In some embodiments, the immune cells comprise B cells.

[0118] In several embodiments, lymphocytes are used in connection with one or more additional engineered cells as disclosed herein. Some embodiments of the methods and compositions described herein relate to a lymphocyte that includes a tumor-directed CAR, or a nucleic acid encoding the tumor-directed CAR. In some embodiments, the lymphocytes express a CAR that binds to a tumor antigen, for example, CD19, CD123, CD70, Her2, mesothelin, Claudin 6, BCMA, or EGFR.

[0119] In some embodiments, the lymphocytes are engineered to a membrane-bound interleukin 15 (mbIL15) domain. In some embodiments, the lymphocytes engineered to express a chimeric receptor are also engineered to also express (e.g., bicistronically express) a membrane-bound interleukin 15 (mbIL15) domain. Thus, in some embodiments, lymphocytes are engineered to bicistronically express the chimeric receptor and mbIL15. Several embodiments of the methods and compositions disclosed herein relate to lymphocytes engineered to express a CAR that targets a tumor marker, for example, CD19, CD123, CD70, Her2, mesothelin, Claudin 6, BCMA, EGFR, among any of the others disclosed herein, and a membrane-bound interleukin 15 (mbIL15) co-stimulatory domain. Several embodiments of the methods and compositions disclosed herein relate to lymphocytes engineered to express an activating chimeric receptor that targets a ligand on a tumor cell, for example, MICA, MICB, ULBP1, ULBP2, ULBP3, ULBP4, ULBP5, and ULBP6 (among others) and optionally a membrane-bound interleukin 15 (mbIL15) co-stimulatory domain.

[0120] In some embodiments, the monocytes are allogeneic cells. In some embodiments, the monocytes are obtained from a donor who does not have cancer.

### T Cells for Immunotherapy

[0121] In some embodiments, the immune cells comprise T cells. T cells are distinguishable from other lymphocytes sub-types (e.g., B cells or NK cells) based on the presence of a T-cell receptor on the cell surface.

[0122] T cells can be divided into various different subtypes, including effector T cells, helper T cells, cytotoxic T cells, memory T cells, regulatory T cells, natural killer T cell, mucosal associated invariant T cells and gamma delta T cells. In some embodiments, a specific subtype of T cell is engineered. In some embodiments, a T cell is positive for cell surface expression of a marker selected from among the group consisting of CD3, CD4, and/or CD8. In some embodiments, a T cell is positive for cell surface expression of CD3. In some embodiments, a T cell is positive or cell surface expression of CD4. In some embodiments, a T cell is positive or cell surface expression of CD8.

[0123] In some embodiments, CD3+ T cells are engineered. In some embodiments, CD4+ T cells are engineered. In some embodiments, CD8+ T cells are engineered. In some embodiments, regulatory T cells are engineered. In some embodiments, gamma delta T cells are engineered. In some embodiments, a mixed pool of T cell subtypes is engineered. For example, in some embodiments, CD4+ and CD8+ T cells are engineered. In some embodiments, there is no specific selection of a type of T cells to be engineered to express the cytotoxic receptor complexes disclosed herein. In several embodiments, specific techniques, such as use of cytokine stimulation are used to enhance expansion/collection of T cells with a specific marker profile. For example, in several embodiments, activation of certain human T cells, e.g., CD4+ T cells, CD8+ T cells is achieved through use of CD3 and/or CD28 as stimulatory molecules.

[0124] In several embodiments, there is provided a method of treating or preventing cancer or an infectious disease, comprising administering a therapeutically effective amount of T cells expressing the cytotoxic receptor complex and/or a homing moiety as described herein. In several embodiments, there is provided a method of treating or preventing cancer or an infectious disease, comprising administering T cells expressing a cytotoxic receptor complex as described herein. In several embodiments, the engineered T cells are autologous cells, while in some embodiments, the T cells are allogeneic cells. In some embodiments, the T cells are allogeneic cells. In some embodiments, the T cells are obtained from a donor who does not have cancer.

[0125] Several embodiments of the methods and compositions disclosed herein relate to T cells engineered to express a CAR that targets a tumor marker, for example, CD19, CD123, CD70, Her2, mesothelin, Claudin 6, BCMA, EGFR, among any of the others as disclosed herein, and a membrane-bound interleukin 15 (mbIL15) co-stimulatory domain. In some embodiments, T cells express a CAR that binds to CD19. In some embodiments, T cells express a CAR that binds to CD70. Several embodiments of the methods and compositions disclosed herein relate to T cells engineered to express an activating chimeric receptor that targets a ligand on a tumor cell, for example, MICA, MICB, ULBP1, ULBP2, ULBP3, ULBP4, ULBP5, and ULBP6 (among others) and optionally a membrane-bound interleukin 15 (mbIL15) co-stimulatory domain. In some embodiments, T cells express a chimeric receptor that binds to a NKG2D ligand. In some embodiments, T cells express a chimeric receptor comprising an extracellular domain of NKG2D.

[0126] In some embodiments, the T cells are engineered to a membrane-bound interleukin 15 (mbIL15) domain. In some embodiments, the T cells engineered to express a chimeric receptor are also engineered to also express (e.g., bicistronically express) a membrane-bound interleukin 15 (mbIL15) domain. Thus, in some embodiments, the T cells are engineered to bicistronically express the chimeric receptor and mbIL15.

[0127] In some embodiments, the immune cells comprise T cells and NK cells (either from the same donor or from different donors).

### NK Cells for Immunotherapy

[0128] In some embodiments, the immune cells comprise natural killer (NK) cells. In several embodiments, NK cells are preferred because the natural cytotoxic potential of NK cells is relatively high. In several embodiments, it is unexpectedly beneficial that the engineered cells disclosed herein can further upregulate the cytotoxic activity of NK cells, leading to an even more effective activity against target cells (e.g., tumor or other diseased cells).

[0129] In some embodiments, a NK cell is positive for cell surface expression of a marker selected from among the group consisting of CCR7, CD16, CD56, CD57, CD11, CX3CR1, a Killer Ig-like receptor (KIR), NKp30, NKp44, NKp46, or any combination thereof. In some embodiments, a NK cell is positive for cell surface expression of CD16. In some embodiments, a NK cell is positive for cell surface expression of CD56. In some embodiments, a NK cell is positive for cell surface expression of a Killer Ig-like receptor.

[0130] In several embodiments, there is provided a method of treating or preventing cancer or an infectious disease, comprising administering a therapeutically effective amount of natural killer (NK) cells expressing the cytotoxic receptor complex and/or a homing moiety as described herein. In several embodiments, there is provided a method of treating or preventing cancer or an infectious disease, comprising administering NK cells expressing a cytotoxic receptor complex as described herein. In several embodiments, there is provided a method of treating or preventing cancer, comprising administering NK cells expressing a cytotoxic receptor complex as described herein. In several embodiments, there is provided a method of treating or preventing an infectious disease, comprising administering NK cells expressing a cytotoxic receptor complex as described herein. In several embodiments, the engineered NK cells are autologous cells, while in some embodiments, the NK cells are allogeneic cells. In some embodiments, the NK cells are allogeneic cells. In some embodiments, the NK cells are obtained from a donor who does not have cancer.

[0131] Some embodiments of the methods and compositions described herein relate to NK cells engineered to express a CAR that targets a tumor marker, for example, CD19, CD123, CD70, Her2, mesothelin, Claudin 6, BCMA, EGFR, among any of the others disclosed herein, and optionally a membrane-bound interleukin 15 (mbIL15) co-stimulatory domain. In some embodiments, NK cells express a CAR that binds to CD19. In some embodiments, T cells express a CAR that binds to CD70. Several embodiments of the methods and compositions disclosed herein relate to NK cells engineered to express an activating chimeric receptor that targets a ligand on a tumor cell, for example, MICA, MICB, ULBP1, ULBP2, ULBP3, ULBP4, ULBP5, and ULBP6 (among others) and optionally a membrane-bound interleukin 15 (mbIL15) co-stimulatory domain. In some embodiments, NK cells express a chimeric receptor that binds to a NKG2D ligand. In some embodiments, NK cells express a chimeric receptor comprising an extracellular domain of NKG2D.

[0132] In some embodiments, the NK cells are engineered to a membrane-bound interleukin 15 (mbIL15) domain. In some embodiments, the NK cells engineered to express a chimeric receptor are also engineered to also express (e.g., bicistronically express) a membrane-bound interleukin 15 (mbIL15) domain. Thus, in some embodiments, the NK cells are engineered to bicistronically express the chimeric receptor and mbIL15.

[0133] In some embodiments, the NK cells are used in combination with T cells. Thus, in some embodiments, the immune cells comprise T cells and NK cells (either from the same donor or from different donors).

[0134] In some embodiments, the NK cells are derived from cell line NK-92. NK-92 cells are derived from NK cells, but lack major inhibitory receptors displayed by normal NK cells, while retaining the majority of activating receptors. Some embodiments of NK-92 cells described herein related to NK-92 cell engineered to silence certain additional inhibitory receptors, for example, SMAD3, allowing for upregulation of interferon-γ (IFNγ), granzyme B, and/or perforin production. Additional information relating to the NK-92 cell line is disclosed in WO 1998/49268 and U.S. Patent Application Publication No. 2002-0068044 and incorporated in their entireties herein by reference.

[0135] NK-92 cells are used, in several embodiments, in combination with one or more of the other cell types disclosed herein. For example, in one embodiment, NK-92 cells are used in combination with NK cells as disclosed herein. In an additional embodiment, NK-92 cells are used in combination with T cells as disclosed herein.

### Hematopoietic Stem Cells for Cancer Immunotherapy

[0136] In some embodiments, hematopoietic stem cells (HSCs) are used in the methods of immunotherapy disclosed herein. In several embodiments, the cells are engineered to express a homing moiety and/or a cytotoxic receptor complex. HSCs are used, in several embodiments, to leverage their ability to engraft for long-term blood cell production, which could result in a sustained source of targeted anti-cancer effector cells, for example to combat cancer remissions. In several embodiments, this ongoing production helps to offset anergy or exhaustion of other cell types, for example due to the tumor microenvironment.

[0137] In some embodiments, a HSC is positive for cell surface expression of a marker selected from among the group consisting of CD34, CD59, and CD90. In some embodiments, a HSC is positive for cell surface expression of CD34. In some embodiments, a HSC is positive for cell surface expression of CD59. In some embodiments, a HSC is positive for cell surface expression of CD90.

[0138] In several embodiments allogeneic HSCs are used, while in some embodiments, autologous HSCs are used. In several embodiments, HSCs are used in combination with one or more additional engineered cell type disclosed herein. Some embodiments of the methods and compositions described herein relate to a stem cell, such as a hematopoietic stem cell engineered to express a CAR that targets a tumor marker, for example, CD19, CD123, CD70, Her2, mesothelin, Claudin 6, BCMA, EGFR, among any of the others disclosed herein, and optionally a membrane-bound interleukin 15 (mbIL15) co-stimulatory domain. Several embodiments of the methods and compositions disclosed herein relate to hematopoietic stem cells engineered to express an activating chimeric receptor that targets a ligand on a tumor cell, for example, MICA, MICB, ULBP1, ULBP2, ULBP3, ULBP4, ULBP5, and ULBP6 (among others) and optionally a membrane-bound interleukin 15 (mbIL15) co-stimulatory domain.

### Induced Pluripotent Stem Cells

[0139] In some embodiments, immune cells are derived (differentiated) from pluripotent stem cells (PSCs). In some embodiments, immune cells (e.g., NK and/or T cells) derived from induced pluripotent stem cells (iPSCs) are used in the method of immunotherapy disclosed herein. For example, in some embodiments, NK cells, T cells, or both are derived from iPSCs. iPSCs are used, in several embodiments, to leverage their ability to differentiate and derive into non-pluripotent cells, including, but not limited to, CD34 cells, hemogenic endothelium cells, HSCs (hematopoietic stem and progenitor cells), hematopoietic multipotent progenitor cells, T cell progenitors, NK cell progenitors, T cells, NKT cells, NK cells, and B cells comprising one or several genetic modifications at selected sites through differentiating iPSCs or less differentiated cells comprising the same genetic modifications at the same selected sites. In several embodiments, the iPSCs are used to generate iPSC-derived NK or T cells. In several embodiments, the iPSCs are used to generate iPSC-derived NK cells. In several embodiments, the iPSCs are used to generate iPSC-derived T cells.

[0140] In several embodiments, the cells are engineered to express a homing moiety and/or a cytotoxic receptor complex. In several embodiments, iPSCs are used in combination with one or more additional engineered cell type disclosed herein.

[0141] Several embodiments of the methods and compositions disclosed herein relate to induced pluripotent stem cells engineered to express an activating chimeric receptor that targets a ligand on a tumor cell, for example, CD19, CD123, CD70, Her2, mesothelin, Claudin 6, BCMA, or EGFR. In some embodiments, the iPSCs engineered to express a chimeric receptor are engineered to also express (e.g., bicistronically express) a membrane-bound interleukin 15 (mbIL15) co-stimulatory domain. Some embodiments of the methods and compositions described herein relate to a stem cell, such as an induced pluripotent stem cell engineered to express a CAR that targets a tumor marker, for example, CD19, CD123, CD70, Her2, mesothelin, Claudin 6, BCMA, EGFR, among any of the others disclosed herein, and optionally a membrane-bound interleukin 15 (mbIL15) co-stimulatory domain.

[0142] Several embodiments of the methods and compositions disclosed herein relate to induced pluripotent stem cells engineered to express an activating chimeric receptor that targets a ligand on a tumor cell, for example, MICA, MICB, ULBP1, ULBP2, ULBP3, ULBP4, ULBP5, and ULBP6 (among others). In some embodiments, the iPSCs engineered to express a chimeric receptor are engineered to also express (e.g., bicistronically express) a membrane-bound interleukin 15 (mbIL15) co-stimulatory domain. Several embodiments of the methods and compositions disclosed herein relate to induced pluripotent stem cells engineered to express an activating chimeric receptor that targets a ligand on a tumor cell, for example, MICA, MICB, ULBP1, ULBP2, ULBP3, ULBP4, ULBP5, and ULBP6 (among others) and optionally a membrane-bound interleukin 15 (mbIL15) co-stimulatory domain.

[0143] In several embodiments, the engineered iPSCs are differentiated into NK, T, or other immune cells, such as for use in a composition or method provided herein. In several embodiments, the engineered iPSCs are differentiated into NK cells. In several embodiments, the engineered iPSCs are differentiated into T cells. In several embodiments, the engineered iPSCs are differentiated into NK and T cells.

### Genetic Editing of Immune Cells

[0144] As discussed above, a variety of cell types can be utilized in cellular immunotherapy. Further, as elaborated on in more detail below, and shown in the Examples, genetic modifications can be made to these cells in order to enhance one or more aspects of their efficacy (e.g., cytotoxicity) and/or persistence (e.g., active life span). As discussed herein, in several embodiments NK cells are used for immunotherapy. In several embodiments provided for herein, gene editing of the NK cell can advantageously impart to the edited NK cell the ability to resist and/or overcome various inhibitory signals that are generated in the tumor microenvironment. It is known that tumors generate a variety of signaling molecules that are intended to reduce the anti-tumor effects of immune cells. As discussed in more detail below, in several embodiments, gene editing of the NK cell limits this tumor microenvironment suppressive effect on the NK cells, T cells, combinations of NK and T cells, or any edited/engineered immune cell provided for herein.

[0145] As discussed below, in several embodiments, gene editing is employed to reduce or knockout expression of target proteins, for example by disrupting the underlying gene encoding the protein.

[0146] In several embodiments, gene editing can reduce transcription of a target gene by about 30%, about 40%, about 50%, about 60%, about 70%, about 75%, about 80%, about 85%, about 90%, about 95%, about 97%, about 98%, about 99%, or more (including any amount between those listed). In several embodiments, gene editing reduces transcription of a target gene by at least about 30%. In several embodiments, gene editing reduces transcription of a target gene by at least about 40%. In several embodiments, gene editing reduces transcription of a target gene by at least about 50%. In several embodiments, gene editing reduces transcription of a target gene by at least about 60%.

[0147] In several embodiments, gene editing reduces transcription of a target gene by at least about 70%. In several embodiments, gene editing reduces transcription of a target gene by at least about 80%. In several embodiments, gene editing reduces transcription of a target gene by at least about 90%. In several embodiments, the gene is completely knocked out, such that transcription of the target gene is undetectable.

[0148] In several embodiments, gene editing can reduce expression of a target protein by about 30%, about 40%, about 50%, about 60%, about 70%, about 75%, about 80%, about 85%, about 90%, about 95%, about 97%, about 98%, about 99%, or more (including any amount between those listed). In several embodiments, gene editing reduces expression of a target protein by at least about 30%. In several embodiments, gene editing reduces expression of a target protein by at least about 40%. In several embodiments, gene editing reduces expression of a target protein by at least about 50%. In several embodiments, gene editing reduces expression of a target protein by at least about 60%. In several embodiments, gene editing reduces expression of a target protein by at least about 70%. In several embodiments, gene editing reduces expression of a target protein by at least about 80%. In several embodiments, gene editing reduces expression of a target protein by at least about 90%. In several embodiments, the gene is completely knocked out, such that expression of the target protein is undetectable.

[0149] In several embodiments, gene editing is used to “knock in” or otherwise increase transcription of a target gene. In several embodiments, transcription of a target gene is increased by about 30%, about 40%, about 50%, about 60%, about 70%, about 75%, about 80%, about 85%, about 90%, about 95%, about 97%, about 98%, about 99%, or more (including any amount between those listed). In several embodiments, transcription of a target gene is increased by at least about 30%. In several embodiments, transcription of a target gene is increased by at least about 40%. In several embodiments, transcription of a target gene is increased by at least about 50%. In several embodiments, transcription of a target gene is increased by at least about 60%. In several embodiments, transcription of a target gene is increased by at least about 70%. In several embodiments, transcription of a target gene is increased by at least about 80%. In several embodiments, transcription of a target gene is increased by at least about 90%. In several embodiments, transcription of a target gene is increased by at least about 100%.

[0150] In several embodiments, gene editing is used to “knock in” or otherwise enhance expression of a target protein. In several embodiments, expression of a target protein can be enhanced by about 30%, about 40%, about 50%, about 60%, about 70%, about 75%, about 80%, about 85%, about 90%, about 95%, about 97%, about 98%, about 99%, or more (including any amount between those listed). In several embodiments, expression of a target protein is increased by at least about 30%. In several embodiments, expression of a target protein is increased by at least about 40%. In several embodiments, expression of a target protein is increased by at least about 50%. In several embodiments, expression of a target protein is increased by at least about 60%. In several embodiments, expression of a target protein is increased by at least about 70%. In several embodiments, expression of a target protein is increased by at least about 80%. In several embodiments, expression of a target protein is increased by at least about 90%. In several embodiments, expression of a target protein is increased by at least about 100%.

[0151] Unless indicated otherwise to the contrary, the sequences provided for guide RNAs that are recited using deoxyribonucleotides refer to the target DNA and shall be considered as also referencing those guides used in practice (e.g., employing ribonucleotides, where the ribonucleotide uracil is used in lieu of deoxyribonucleotide thymine or vice-versa where thymine is used in lieu of uracil, wherein both are complementary base pairs to adenine when reciting either an RNA or DNA sequence). For example, a gRNA with the sequence ATGCTCAATGCGTC (SEQ ID NO: 995) shall also refer to the following sequence AUGCUCAAUGCGUC (SEQ ID NO: 996) or a gRNA with sequence AUGCUCAAUGCGUC (SEQ ID NO: 996) shall also refer to the following sequence ATGCTCAATGCGTC (SEQ ID NO: 995).

[0152] As discussed in more detail below, a variety of approaches can be employed in a given embodiment to improve or alter one or more characteristics of immune cells for immunotherapy. Genetic editing can be used to reduce, eliminate (e.g., knockout), or increase expression of a target gene. For example, the transcription of the target gene and/or the translation of a protein encoded by the target gene (e.g., a target protein) can be reduced, eliminated (e.g., knocked out), or increased. The target gene can be implicated in the immune functionality of the cell, or be a part of a signaling pathway for which an increase or decrease in function is desired. Further detailed below are various gene targets. Various immunosuppressive approaches can be employed in some embodiments, in order to reduce the activity (e.g., cytotoxicity) of an immune cell against another cell(s) which is not a tumor cell (e.g., another cell within the population to be used for immunotherapy). Viral immunosuppressive peptides are disclosed herein. Additional disruptions (or deletions/partial replacements) of certain immune proteins can be used to increase persistence of a population of cells. In several embodiments, the increased persistence is a result of edits to that population of cells, while in some embodiments the increased persistence is because another population of cells was modified and therefore is less cytotoxic to the first population of cells. Changes or alterations in expression of native genes or proteins involved in immune function, such as HLA genes or proteins are used in some embodiments. Any combination of these approaches may also be used, depending on the embodiment.

[0153] By way of non-limiting example, TGF-beta is one such cytokine released by tumor cells that results in immune suppression within the tumor microenvironment. That immune suppression reduces the ability of immune cells, even engineered CAR-immune cells is some cases, to destroy the tumor cells, thus allowing for tumor progression. In several embodiments, as discussed in detail below, immune checkpoints are disrupted through gene editing. In several embodiments, blockers of immune suppressing cytokines in the tumor microenvironment are used, including blockers of their release or competitive inhibitors that reduce the ability of the signaling molecule to bind and inhibit an immune cell. Such signaling molecules include, but are not limited to TGF-beta, IL10, arginase, inducible NOS, reactive-NOS, Arg1, Indoleamine 2,3-dioxygenase (IDO), and PGE₂. However, in additional embodiments, there are provided immune cells, such as NK cells, wherein the ability of the NK cell (or other cell) to respond to a given immunosuppressive signaling molecule is disrupted and/or eliminated. For example, in several embodiments, in several embodiments, NK cells or T cells are genetically edited to have reduced sensitivity to TGF-beta. TGF-beta is an inhibitor of NK cell function on at least the levels of proliferation and cytotoxicity. See, for example, FIG. 8A which schematically shows some of the inhibitory pathways by which TGF-beta reduces NK cell activity and/or proliferation. Thus, according to some embodiments, the expression of the TGF-beta receptor is knocked down or knocked out through gene editing, such that the edited NK cell is resistant to the immunosuppressive effects of TGF-beta in the tumor microenvironment. In several embodiments, the TGFB2 receptor (TGFBR2) is knocked down or knocked out through gene editing of the TGFBR2 gene, for example, by use of CRISPR-Cas editing. Small interfering RNA, antisense RNA, TALENs or zinc fingers are used in other embodiments. Other isoforms of the TGF-beta receptor (e.g., TGF-beta 1 and/or TGF-beta 3) are edited in some embodiments. In some embodiments TGF-beta receptors in T cells are knocked down through gene editing.

[0154] In accordance with additional embodiments, other modulators of one or more aspects of NK cell (or T cell) function are modulated through gene editing. A variety of cytokines impart either negative (as with TGF-beta above) or positive signals to immune cells. By way of non-limiting example, IL15 is a positive regulator of NK cells, which as disclosed herein, can enhance one or more of NK cell homing, NK cell migration, NK cell expansion/proliferation, NK cell cytotoxicity, and/or NK cell persistence. To keep NK cells in check under normal physiological circumstances, a cytokine-inducible SH2-containing protein (CIS, encoded by the CISH gene) acts as a critical negative regulator of IL15 signaling in NK cells. As discussed herein, IL15 biology impacts multiple aspects of NK cell functionality, including, but not limited to, proliferation/expansion, activation, cytotoxicity, persistence, homing, and migration, among others. Thus, according to several embodiments, editing CISH enhances the functionality of NK cells across multiple functionalities, leading to a more effective and long-lasting NK cell therapeutic. In several embodiments, inhibitors of CIS are used in conjunction with engineered NK cell administration. In several embodiments, the CIS expression is knocked down or knocked out through gene editing of the CISH gene, for example, by use of CRISPR-Cas editing. Small interfering RNA, antisense RNA, TALENs or zinc fingers are used in other embodiments. In some embodiments CIS expression in T cells is knocked down through gene editing.

[0155] In several embodiments, CISH gene editing endows an NK cell with enhanced ability to home to a target site. In several embodiments, CISH gene editing endows an NK cell with enhanced ability to migrate, e.g., within a tissue in response to, for example, chemoattractants, or away from repellants. In several embodiments, CISH gene editing endows an NK cell with enhanced ability to be activated, and thus exert, for example, anti-tumor effects. In several embodiments, CISH gene editing endows an NK cell with enhanced proliferative ability, which in several embodiments, allows for generation of robust NK cell numbers from a donor blood sample. In addition, in such embodiments, NK cells edited for CISH and engineered to express a CAR are more readily, robustly, and consistently expanded in culture. In several embodiments, CISH gene editing endows an NK cell with enhanced cytotoxicity. In several embodiments, the editing of CISH synergistically enhances the cytotoxic effects of engineered NK cells and/or engineered T cells that express a CAR.

[0156] In several embodiments, CISH gene editing activates or inhibits a wide variety of pathways. The CIS protein is a negative regulator of IL15 signaling by way of, for example, inhibiting JAK-STAT signaling pathways. These pathways would typically lead to transcription of IL15-responsive genes (including CISH). In several embodiments, knockdown of CISH disinhibits JAK-STAT (e.g., JAK1-STAT5) signaling and there is enhanced transcription of IL15-responsive genes. In several embodiments, knockout of CISH yields enhanced signaling through mammalian target of rapamycin (mTOR), with corresponding increases in expression of genes related to cell metabolism and respiration. In several embodiments, knockout of CISH yields IL15 induced increased expression of IL-2Rα (CD25), but not IL-15Rα or IL-2/15RP, enhanced NK cell membrane binding of IL15 and/or IL2, increased phosphorylation of STAT-3 and/or STAT-5, and elevated expression of the antiapoptotic proteins, such as Bcl-2. In several embodiments, CISH knockout results in IL15-induced upregulation of selected genes related to mitochondrial functions (e.g., electron transport chain and cellular respiration) and cell cycle. Thus, in several embodiments, knockout of CISH by gene editing enhances the NK cell cytotoxicity and/or persistence, at least in part via metabolic reprogramming. In several embodiments, negative regulators of cellular metabolism, such as TXNIP, are downregulated in response to CISH knockout. In several embodiments, promotors for cell survival and proliferation including BIRC5 (Survivin), TOP2A, CKS2, and RACGAP1 are upregulated after CISH knockout, whereas antiproliferative or proapoptotic proteins such as TGFB1, ATM, and PTCH1 are downregulated. In several embodiments, CISH knockout alters the state (e.g., activates or inactivates) signaling via or through one or more of CXCL-10, IL2, TNF, IFNg, IL13, IL4, Jnk, PRF1, STAT5, PRKCQ, IL2 receptor Beta, SOCS2, MYD88, STAT3, STAT1, TBX21, LCK, JAK3, IL& receptor, ABL1, IL9, STAT5A, STAT5B, Tcf7, PRDM1, and/or EOMES.

[0157] In several embodiments, gene editing of the immune cells can also provide unexpected enhancement in the expansion, persistence and/or cytotoxicity of the edited immune cell. As disclosed herein, engineered cells (e.g., those expressing a CAR) may also be edited, the combination of which provides for a robust cell for immunotherapy. In several embodiments, the edits allow for unexpectedly improved NK cell expansion, persistence and/or cytotoxicity. In several embodiments, knockout of CISH expression in NK cells removes a potent negative regulator of IL15-mediated signaling in NK cells, disinhibits the NK cells and allows for one or more of enhanced NK cell homing, NK cell migration, activation of NK cells, expansion, cytotoxicity and/or persistence. Additionally, in several embodiments, the editing can enhance NK and/or T cell function in the otherwise suppressive tumor microenvironment. In several embodiments, CISH gene editing results in enhanced NK cell expansion, persistence and/or cytotoxicity without requiring Notch ligand being provided exogenously.

[0158] As discussed above, T cells that are engineered to express a CAR or chimeric receptor are employed in several embodiments. Also as mentioned above, T cells express a T Cell Receptor (TCR) on their surface. As disclosed herein, in several embodiments, autologous immune cells are transferred back into the original donor of the cells. In such embodiments, immune cells, such as NK cells or T cells are obtained from patients, expanded, genetically modified (e.g., with a CAR or chimeric receptor) and/or optionally further expanded and re-introduced into the patient.

[0159] As disclosed herein, in several embodiments, allogeneic immune cells are transferred into a subject that is not the original donor of the cells. In such embodiments, immune cells, such as NK cells, T cells, or both, are obtained from a donor, expanded, genetically modified (e.g., with a CAR or chimeric receptor) and/or optionally further expanded and administered to the subject.

[0160] Allogeneic immunotherapy presents several hurdles to be overcome. In immune-competent hosts, the administered allogeneic cells are rapidly rejected, known as host versus graft rejection (HvG). This substantially limits the efficacy of the administered cells, particularly their persistence. In immune-incompetent hosts, allogeneic cells are able to engraft. However, if the administered cells comprise a T cell (several embodiments disclosed herein employ mixed populations of NK and T cells), the endogenous T cell receptor (TCR) specificities recognize the host tissue as foreign, resulting in graft versus host disease (GvHD). GvHD can lead to significant tissue damage in the host (cell recipient). Several embodiments disclosed herein address both of these hurdles, thereby allowing for effective and safe allogeneic immunotherapy. In several embodiments, gene edits can advantageously help to reduce and/or avoid graft vs. host disease (GvHD). A non-limiting embodiment of such an approach, using a mixed population of NK cell and T cells, is schematically illustrated in FIG. 8C, wherein the NK cells are engineered to express a CAR and the T cells are engineered to not only express a CAR, but also edited to render the T cells non-alloreactive. FIG. 8D schematically shows a mechanism by which GvHD occurs. An allogeneic T cell and an allogeneic NK cell, both engineered to express a CAR that targets the tumor, are introduced into a host. However, the T cell still bears the native T-cell receptor (TCR). This TCR recognizes the HLA type of the host cell as “non-self” and can exert cytotoxicity against host cells. FIG. 8E shows a non-limiting embodiment of how GvHD can be reduced or otherwise avoided through gene editing of the T cells. Briefly, as this approach is discussed in more detail below, gene editing can be performed in order to knockout the native TCR on T cells. Lacking a TCR, the allogeneic T cell cannot detect the “non-self” HLA of the host cells, and therefore is not triggered to exert cytotoxicity against host cells. Thus, in several embodiments T cells are subjected to gene editing to either reduce functionality of and/or reduce or eliminate expression of the native T cell. In several embodiments, CRISPR is used to knockout the TCR. These, and other, embodiments are discussed below.

[0161] T cell receptors (TCR) are cell surface receptors that participate in the activation of T cells in response to the presentation of an antigen. The TCR is made up of two different protein chains (it is a heterodimer). The majority of human T cells have TCRs that are made up of an alpha (α) chain and a beta (β) chain (encoded by separate genes). A small percentage of T cells have TCRs made up of gamma and delta (γ/δ) chains (the cells being known as gamma-delta T cells).

[0162] Rather than recognizing an intact antigen (as with immunoglobulins), T cells are activated by processed peptide fragments in association with an MHC molecule. This is known as MHC restriction. When the TCR recognizes disparities between the donor and recipient MHC, that recognition stimulates T cell proliferation and the potential development of GvHD. In some embodiments, the genes encoding either the TCRα (TRAC), TCRβ (TRBC), TCRγ (TRG), and/or the TCRδ (TCRD) are disrupted or otherwise modified to reduce the tendency of donor T cells to recognize disparities between donor and host MHC, thereby reducing recognition of alloantigen and GvHD. For example, disruption of TRAC can reduce or eliminate TCR expression.

[0163] T-cell mediated immunity involves a balance between co-stimulatory and inhibitory signals that serve to fine-tune the immune response. Inhibitory signals, also known as immune checkpoints, allow for avoidance of auto-immunity (e.g., self-tolerance) and also limit immune-mediated damage. Immune checkpoint protein expression is often altered (increased) by tumors, enhancing immune resistance in tumor cells and limiting immunotherapy efficacy. For example, CTLA4 downregulates the amplitude of T cell activation. In contrast, PD1 (in concert with its ligand PD-L1) limits T cell effector functions in peripheral tissue during an inflammatory response and also limits autoimmunity. Immune checkpoint blockade, in several embodiments, helps to overcome barriers to activation of functional cellular immunity. In several embodiments, antagonistic antibodies specific for inhibitory ligands on T cells including Cytotoxic-T-lymphocyte-associated antigen 4 (CTLA-4; also known as CD152) and programmed cell death protein 1 (PD1 or PDCD1 also known as CD279) are used to enhance immunotherapy. In several embodiments, antagonistic antibodies specific for programmed death ligand 1 (PD-L1, also known as B7-H1 or CD274) are used to enhance immunotherapy.

[0164] In several embodiments, there is provided genetically modified T cells that are non-alloreactive and highly active. In several embodiments, the T cells are further modified such that certain immune checkpoint genes are inactivated, and the immune checkpoint proteins are thus not expressed by the T cell. In several embodiments, this is done in the absence of manipulation or disruption of the CD3z signaling domain (e.g., the TCRs are still able initiate T cell signaling).

[0165] In several embodiments, genetic inactivation of TCRalpha and/or TCRbeta coupled with inactivation of immune checkpoint genes in T lymphocytes derived from an allogeneic donor significantly reduces the risk of GvHD. In several embodiments, this is done by eliminating at least a portion of one or more of the substituent protein chains (alpha, beta, gamma, and/or delta) responsible for recognition of MHC disparities between donor and recipient cells. In some embodiments, TCR expression is disrupted by knocking out TRAC. In several embodiments, this is done while still allowing for T cell proliferation and activity.

[0166] In some embodiments wherein allogeneic cells are administered, the receiving subject may receive some other adjunct treatment to support or otherwise enhance the function of the administered immune cells. In several embodiments, the subject may be pre-conditioned (e.g., with radiation or chemotherapy). In some embodiments, the adjunct treatment comprises administration of lymphocyte growth factors (such as IL-2).

[0167] Moreover, in several embodiments, editing can improve persistence of administered cells (whether NK cells, T cells, or otherwise) for example, by masking cells to the host immune response. In some cases, a recipient's immune cells will attack donor cells, especially from an allogeneic donor, known as Host vs. Graft disease (HvG). FIG. 8F shows a schematic representation of HvG, where the host T cells, with a native/functional TCR, identify HLA on donor T and/or donor NK cells as non-self. In such cases, the host T-cell TCR binding to allogeneic cell HLA leads to elimination of allogeneic cells, thus reducing the persistence of the donor engineered NK and/or T cells. Regarding HvG, to prevent rejection of administered allogeneic T cells, in some embodiments the subject receiving the cells requires suppression of their immune system. In several embodiments, glucocorticoids are used, and include, but are not limited to beclomethasone, betamethasone, budesonide, cortisone, dexamethasone, hydrocortisone, methylprednisolone, prednisolone, prednisone, triamcinolone, among others. Activation of the glucocorticoid receptor in recipient's own T cells alters expression of genes involved in the immune response and results in reduced levels of cytokine production, which translates to T cell anergy and interference with T cell activation (in the recipient). Other embodiments relate to administration of antibodies that can deplete certain types of the recipient's immune cells. One such target is CD52, which is expressed at high levels on T and B lymphocytes and lower levels on monocytes while being absent on granulocytes and bone marrow precursors. Treatment or pre-treatment of the recipient with Alemtuzumab, a humanized monoclonal antibody directed against CD52, has been shown to induce a rapid depletion of circulating lymphocytes and monocytes, thus lessening the probability of HvG, given the reduction in recipient immune cells. Immunosuppressive drugs may limit the efficacy of administered allogeneic engineered T cells. Therefore, as disclosed herein, several embodiments relate to genetically engineered allogeneic donor cells that are resistant to immunosuppressive treatment. In several embodiments, as discussed in more detail below, immune cells, such as NK cells and/or T cells are edited (in addition to being engineered to express a CAR) to extend their persistence by avoiding cytotoxic responses from host immune cells. In several embodiments, gene editing to remove one or more HLA molecules from the allogeneic NK and/or T cells reduces elimination by host T-cells. In several embodiments, the allogeneic NK and/or T cells are edited to knock out one or more of beta-2 microglobulin (an HLA Class I molecule) and CIITA (an HLA Class II molecule). FIG. 8G schematically depicts this approach.

[0168] In some embodiments of mixed (e.g., NK and T) allogeneic cell therapy, the populations of engineered cells actually target one another, for example when the therapeutic cells are edited to remove HLA molecules in order to avoid HvG. Such editing of, for example CAR T cells, can result in the vulnerability of the edited allogeneic CAR T cells to cytotoxic attack by the CAR NK cells as well as elimination by host NK cells. This is caused by the missing “self” inhibitory signals generally presented by KIR molecules. FIG. 8H schematically depicts this process. In several embodiments, gene editing can be used to knock in expression of one or more “masking” molecules which mask the allogeneic cells from the host immune system and from fratricide by other administered engineered cells. FIG. 8I schematically depicts this approach. In several embodiments, proteins can be expressed on the surface of the allogeneic cells to inhibit targeting by NKs (both engineered NKs and host NKs), which advantageously prolongs persistence of both allogeneic CAR-Ts and CAR-NKs. In several embodiments, gene editing is used to knock in CD47, expression of which effectively functions as a “don't eat me” signal. In several embodiments, gene editing is used to knock in expression of HLA-E. In several embodiments, gene editing is used to knock in a portion of HLA-E. HLA-E binds to both the inhibiting and activating receptors NKG2A and NKG2C, respectively, that exist on the surface of NK cells. However, NKG2A is expressed to a greater degree in most human NK cells, thus, in several embodiments, expression of HLA-E on engineered cells results in an inhibitory effect of NK cells (both host and donor) against such cells edited to (or naturally expressing) HLA-E. In addition, in several embodiments, one or more viral HLA homologs are knocked in such that they are expressed by the engineered NK and/or T cells, thus conferring on the cells the ability of viruses to evade the host immune system. In several embodiments, these approaches advantageously prolong persistence of both allogeneic CAR-Ts and CAR-NKs.

### Methods of Genetic Editing

[0169] In several embodiments, genetic editing (whether knock out or knock in) of any of the target genes (e.g., CISH, TGFBR2, TRAC, B2M, CIITA, CD47, HLA-E, or any other target gene disclosed herein), is accomplished through targeted introduction of DNA breakage, and a subsequent DNA repair mechanism. In several embodiments, double strand breaks of DNA are repaired by non-homologous end joining (NHEJ), wherein enzymes are used to directly join the DNA ends to one another to repair the break. NHEJ is an error-prone process. In general, in the absence of a repair template, the NHEJ process re-ligates the ends of the cleaved DNA strands, which frequently results in nucleotide deletions and insertions at the cleavage site. In several embodiments, however, double strand breaks are repaired by homology directed repair (HDR), which is advantageously more accurate, thereby allowing sequence specific breaks and repair. HDR uses a homologous sequence as a template for regeneration of missing DNA sequences at the break point, such as a vector with the desired genetic elements (e.g., an insertion element to disrupt the coding sequence of a TCR subunit) within a sequence that is homologous to the flanking sequences of a double strand break. This will result in the desired change (e.g., insertion) being inserted at the site of the DSB. The HDR pathway can occur by way of the canonical HDR pathway or the alternative HDR pathway. Unless otherwise indicated, the term “HDR” or “homology-directed repair” as used herein encompasses both canonical HDR and alternative HDR.

[0170] Canonical HDR or “canonical homology-directed repair” or cHDR,” are used interchangeably, and refers to the process of repairing DNA damage using a homologous nucleic acid (e.g., an endogenous homologous sequence, such as a sister chromatid; or an exogenous nucleic acid, such as a donor template). Canonical HDR typically acts when there has been a significant resection at the DSB, forming at least one single-stranded portion of DNA. In a normal cell, canonical HDR typically involves a series of steps such as recognition of the break, stabilization of the break, resection, stabilization of single-stranded DNA, formation of a DNA crossover intermediate, resolution of the crossover intermediate, and ligation. The canonical HDR process requires RAD51 and BRCA2, and the homologous nucleic acid, e.g., repair template, is typically double-stranded. In canonical HDR, a double-stranded polynucleotide, e.g., a double-stranded repair template, is introduced, which comprises a sequence that is homologous to the targeting sequence, and which will either be directly integrated into the targeting sequence or will be used as a template to insert the sequence, or a portion the sequence, of the repair template into the target gene. After resection at the break, repair can progress by different pathways, e.g., by the double Holliday junction model (also referred to as the double strand break repair, or DSBR, pathway), or by the synthesis-dependent strand annealing (SDSA) pathway.

[0171] In the double Holliday junction model, strand invasion occurs by the two single stranded overhangs of the targeting sequence to the homologous sequences in the double-stranded polynucleotde, e.g., double stranded donor template, which results in the formation of an intermediate with two Holliday junctions. The junctions migrate as new DNA is synthesized from the ends of the invading strand to fill the gap resulting from the resection. The end of the newly synthesized DNA is ligated to the resected end, and the junctions are resolved, resulting in the insertion at the targeting sequence, or a portion of the targeting sequence that includes the gene variant. Crossover with the polynucleotide, e.g., repair template, may occur upon resolution of the junctions.

[0172] In the SDSA pathway, only one single stranded overhang invades the polynucleotide, e.g., donor template, and new DNA is synthesized from the end of the invading strand to fill the gap resulting from resection. The newly synthesized DNA then anneals to the remaining single stranded overhang, new DNA is synthesized to fill in the gap, and the strands are ligated to produce the modified DNA duplex.

[0173] Alternative HDR, or “alternative homology-directed repair,” or “alternative HDR,” are used interchangeably, and refers, in some embodiments, to the process of repairing DNA damage using a homologous nucleic acid (e.g., an endogenous homologous sequence, such as a sister chromatid; or an exogenous nucleic acid, such as a repair template). Alternative HDR is distinct from canonical HDR in that the process utilizes different pathways from canonical HDR, and can be inhibited by the canonical HDR mediators, RAD51 and BRCA2. Moreover, alternative HDR is also distinguished by the involvement of a single-stranded or nicked homologous nucleic acid template, e.g., repair template, whereas canonical HDR generally involves a double-stranded homologous template. In the alternative HDR pathway, a single strand template polynucleotide, e.g., repairtemplate, is introduced. A nick, single strand break, or DSB at the cleavage site, for altering a desired target site, e.g., a gene variant in a target gene, is mediated by a nuclease molecule, and resection at the break occurs to reveal single stranded overhangs. Incorporation of the sequence of the template polynucleotide, e.g., repair template, to alter the target site of the DNA typically occurs by the SDSA pathway, as described herein. In some embodiments, HDR is carried out by introducing, into a cell, one or more agent(s) capable of inducing a DSB, and a repair template, e.g., a single-stranded oligonucleotide. The introducing can be carried out by any suitable delivery. The conditions under which HDR is allowed to occur can be any conditions suitable for carrying out HDR in a cell.

[0174] In several embodiments, gene editing is accomplished by one or more of a variety of engineered nucleases. In several embodiments, restriction enzymes are used, particularly when double strand breaks are desired at multiple regions. In several embodiments, a bioengineered nuclease is used. Depending on the embodiment, one or more of a Zinc Finger Nuclease (ZFN), transcription-activator like effector nuclease (TALEN), meganuclease and/or clustered regularly interspaced short palindromic repeats (CRISPR/Cas9) system are used to specifically edit the genes encoding one or more of the TCR subunits.

[0175] Meganucleases are characterized by their capacity to recognize and cut large DNA sequences (from 14 to 40 base pairs). In several embodiments, a meganuclease from the LAGLIDADG family is used, and is subjected to mutagenesis and screening to generate a meganuclease variant that recognizes a unique sequence(s), such as a specific site in a TCR subunit (e.g., TRAC), or CISH, or any other target gene disclosed herein. Target sites in a TCR subunit can readily be identified. Further information of target sites within a region of a TCR subunit can be found in US Patent Publication No. 2018/0325955, and US Patent Publication No. 2015/0017136, each of which is incorporated by reference herein in its entirety. In several embodiments, two or more meganucleases, or functions fragments thereof, are fused to create a hybrid enzyme that recognizes a desired target sequence within the target gene (e.g., CISH).

[0176] In contrast to meganucleases, ZFNs and TALEN function based on a non-specific DNA cutting catalytic domain which is linked to specific DNA sequence recognizing peptides such as zinc fingers or transcription activator-like effectors (TALEs). Advantageously, the ZFNs and TALENs thus allow sequence-independent cleavage of DNA, with a high degree of sequence-specificity in target recognition. Zinc finger motifs naturally function in transcription factors to recognize specific DNA sequences for transcription. The C-terminal part of each finger is responsible for the specific recognition of the DNA sequence. While the sequences recognized by ZFNs are relatively short, (e.g., ˜3 base pairs), in several embodiments, combinations of 2, 3, 4, 5, 6, 7, 8, 9, 10 or more zinc fingers whose recognition sites have been characterized are used, thereby allowing targeting of specific sequences, such as a portion of the TCR (or an immune checkpoints). The combined ZFNs are then fused with the catalytic domain(s) of an endonuclease, such as FokI (optionally a FokI heterodimer), in order to induce a targeted DNA break. Additional information on uses of ZFNs to edit a TCR subunit and/or immune checkpoints can be found in U.S. Pat. No. 9,597,357, which is incorporated by reference herein.

[0177] Transcription activator-like effector nucleases (TALENs) are specific DNA-binding proteins that feature an array of 33 or 34-amino acid repeats. Like ZFNs, TALENs are a fusion of a DNA cutting domain of a nuclease to TALE domains, which allow for sequence-independent introduction of double stranded DNA breaks with highly precise target site recognition. TALENs can create double strand breaks at the target site that can be repaired by error-prone non-homologous end-joining (NHEJ), resulting in gene disruptions through the introduction of small insertions or deletions. Advantageously, TALENs are used in several embodiments, at least in part due to their higher specificity in DNA binding, reduced off-target effects, and ease in construction of the DNA-binding domain.

[0178] CRISPRs (Clustered Regularly Interspaced Short Palindromic Repeats) are genetic elements that bacteria use as protection against viruses. The repeats are short sequences that originate from viral genomes and have been incorporated into the bacterial genome. Cas (CRISPR associated proteins) process these sequences and cut matching viral DNA sequences. By introducing plasmids containing Cas genes and specifically constructed CRISPRs into eukaryotic cells, the eukaryotic genome can be cut at any desired position. Additional information on CRISPR can be found in US Patent Publication No. 2014/0068797, which is incorporated by reference herein.

[0179] In several embodiments, CRISPR is used to manipulate the gene(s) encoding a target gene to be knocked out or knocked in, for example CISH, TGFBR2, TRAC, B2M, CIITA, CD47, HLA-E, etc. In several embodiments, CRISPR is used to edit one or more of the TCRs of a T cell and/or the genes encoding one or more immune checkpoints. In several embodiments, CRISPR is used to edit a gene encoding an immune checkpoint. In several embodiments, the immune checkpoint is selected from one or more of CTLA4 and PD1. In several embodiments, the immune checkpoint comprises CTLA4. In some embodiments, the immune checkpoint comprises PD-1. In some embodiments, the immune checkpoint comprises PD-L1. In several embodiments, CRISPR is used to edit a gene encoding a TCR subunit. In several embodiments, CRISPR is used to edit TRAC. In several embodiments, CRISPR is used to edit TRBC. In several embodiments, CRISPR is used to truncate one or more of TCRα, TCRβ, TCRγ, and TCRδ. In several embodiments, a TCR is truncated without impacting the function of the CD3z signaling domain of the TCR.

[0180] Depending on the embodiment and which target gene is to be edited, a Class 1 or Class 2 Cas is used. In several embodiments, a Class 1 Cas is used and the Cas type is selected from the following types: I, IA, IB, IC, ID, IE, IF, IU, III, IIIA, IIIB, IIIC, HID, IV IVA, IVB, and combinations thereof. In several embodiments, the Cas is selected from the group consisting of Cas3, Cas8a, Cas5, Cas8b, Cas8c, Cas10d, Cse1, Cse2, Csy1, Csy2, Csy3, GSU0054, Cas10, Csm2, Cmr5, Cas10, Csx11, Csx10, Csf1, and combinations thereof. In several embodiments, a Class 2 Cas is used and the Cas type is selected from the following types: II, IIA, IIB, IIC, V, VI, and combinations thereof. In several embodiments, the Cas is selected from the group consisting of Cas9, Csn2, Cas4, Cas12a (previously known as Cpf1), C2c1, C2c3, Cas13a (previously known as C2c2), Cas13b, Cas13c, CasX, CasY and combinations thereof. In some embodiments, the Cas is Cas9. In some embodiments, class 2 CasX is used, wherein CasX is capable of forming a complex with a guide nucleic acid and wherein the complex can bind to a target DNA, and wherein the target DNA comprises a non-target strand and a target strand. In some embodiments, class 2 CasY is used, wherein CasY is capable of binding and modifying a target nucleic acid and/or a polypeptide associated with target nucleic acid.

[0181] In several embodiments, as discussed above, editing of CISH advantageously imparts to the edited cells, particularly edited NK cells, enhanced expansion, cytotoxicity and/or persistence. Additionally, in several embodiments, the modification of the TCR comprises a modification to TCRα, but without impacting the signaling through the CD3 complex, allowing for T cell proliferation. In one embodiment, the TCRα is inactivated by expression of pre-Tα in the cells, thus restoring a functional CD3 complex in the absence of a functional alpha/beta TCR. As disclosed herein, the non-alloreactive modified T cells are also engineered to express a CAR to redirect the non-alloreactive T cells specificity towards tumor marker, but independent of MHC. Provided herein are are immune cells (e.g., NK or T cells) comprising any combination of genetic edits as described herein. Combinations of editing are used in several embodiments, such as knockout of the TCR (e.g., TRAC) and CISH in combination, or knock out of CISH and knock in of CD47, by way of non-limiting examples. In some embodiments, the genetic edits comprise edits to genes encoding TRAC and CISH. In some embodiments, the genetic edits comprise edits to genes encoding CISH and CD47.

### Reduction in MHC I or MHC II Expression

[0182] In several embodiments, immune cells are genetically edited to express non-native (e.g., reduced) levels of major histocompatibility complex class 1 molecules on the surface of the cells. As discussed elsewhere herein, other approaches result in elimination of the surface expression of MHC I molecules (e.g., a B2M knockout or a disruption/knockout of another gene encoding one or more portions of the MHC I complex).

[0183] Alternatively, in several embodiments, methods are used to reduce the frequency of expression of the MHC I complex within a population of cells, wherein each member of the population expresses some amount of MHC I molecules, but the average frequency of MHC I expression for individual cells within the population is reduced as compared to natural immune cells. In several embodiments, this approach allows a dual beneficial effect to be achieved, in that (i) the reduced frequency of MHC I expression serves to reduce the chances of host T cells attacking the engineered cells and (ii) the retention of some degree of MHC I expression (e.g., non-zero surface expression across the population or a portion of the population) reduces the chances of host NK cells eliminating the engineered cells as well as reducing the chances of fratricide within the engineered cells. In this manner, embodiments provided for herein enhance the persistence of engineered cells (NK cells, T cells, or a mixed NK/T population) for use in allogeneic therapy.

[0184] In several embodiments discussed elsewhere here, genetic edits to knockout expression of the B2M gene are provided for, which eliminates MHC I molecule expression on the cell surface. As an alternative, in several embodiments, B2M expression is reduced, but not eliminated by RNA interference. In several embodiments, microRNAs are used to target and reduce B2M expression. In several embodiments, small interfering RNAs are used to target and reduce B2M expression. In several embodiments, combinations of microRNAs and siRNAs are used. As a result of reducing the RNA encoding B2M, the reduction of B2M expression can advantageously be transient in nature.

[0185] In additional embodiments, gene editing can be used to reduce the expression of one or more genes that encode proteins that are involved in antigen processing/MHC I assembly. FIG. 25 schematically depicts non-limiting embodiments of target proteins involved in this pathway, as does Example 1, below. A protein that is present in an immune cell can be processed by the proteasome to generate a population of small peptides. Two proteins, TAP1 and TAP2, function to translocate the peptides into the endoplasmic reticulum, where MHC I molecules are assembled. Calreticulin (CRT) is a calcium-binding chaperone that, in the ER, facilitates folding of MHC I molecules along with the related MHC I recruitment/assembly factor, Tapasin. The thiol oxidoreductase ERp57 has been found to interact with Tapasin, and in its absence, the recruitment of MHC class I molecules into this complex by Tapasin significantly reduced. In addition to Tapasin, an additional intracellular peptide editor TABPR (also called TABPL; not shown in FIG. 25) functions to select/exchange peptides for attachment to MHC I. Acting as a quality control protein, UDP-glucose:glycoprotein glucosyltransferase 1 (UGT1, also known as UGTA-1) recognizes misfolded proteins/peptides due to lack of glycosylation and re-glycosylates them, allowing proper folding. It has been determined that peptide formation still occurs in the absence of UGT-1 (there are redundancies in the folding process), surface level of MHC I is reduced, maturation and assembly are delayed, and peptide selection is impaired. After being loaded with an appropriately processed peptide, the MHC I/B2M/peptide molecule is trafficked through the Golgi apparatus and expressed on the surface of the cell. Thus, any of the genes involved in this processing/assembly/trafficking pathway are viable targets to reduce MHC I expression frequency. In some embodiments, one or more of UGT-1 (UGTA-1); TAPBPL (TAPBPR); TAPBP (Tapasin); TAP-1; TAP-2; ERp57; Calreticulin (CRT); Endoplasmic reticulum aminopeptidases (ERAP1, ERAP2) and/or immunoproteasome components are targeted for editing, for example using CRISPR. Further, the knockout of antigen presentation pathway genes may also result in altered presentation of antigen peptides, resulting in reduced recognition by T-cells, while still advantageously limiting the inhibitory function of NKs.

[0186] In some embodiments, in place of editing antigen presentation genes or in addition to such edits, various viral peptides are used to further reduce the frequency of MHC I expression. For example, herpesviruses aim to evade recognition and elimination by host cytotoxic T cells by expressing genes which interfere selectively with presentation of viral antigens by MHC I molecules. In several embodiments, one or more antigens from herpes simplex virus ICP47, human cytomegalovirus (HCMV) US3, or HCMV US2, US3, US6, US10 and/or US11 are expressed by engineered immune cells provided for herein in order to decrease presentation of viral proteins and help such cells avoid a host immune response.

[0187] Further examples of proteins that interfere with the MHC class I pathway are encoded by adenoviruses and retroviruses. Two non-limiting examples are the adenovirus E3/19K and the human immunodeficiency virus-1 (HIV-1) Nef gene products. In several embodiments, one or more antigens from adenovirus E3/19K and/or HIV-1 Nef are expressed by engineered immune cells provided for herein in order to decrease presentation of viral proteins and help such cells avoid a host immune response. Combinations of adenovirus, HCMV, HSV, and/or HIV genes are expressed in some embodiments to further enhance the ability of such engineered cells to evade host immune responses.

[0188] In several embodiments, the editing to reduce the frequency of MHC I expression by immune cells is used in combination with expression of viral peptides or other immune-suppressive proteins or peptides discussed herein (e.g., HLA-E, CD47, viral proteins/peptides, etc.).

[0189] In some embodiments, the immune cells are genetically edited to express reduced levels of MHC class II molecules on the surface of the cells. Major histocompatibility complex (MHC) class II transactivator (CIITA) is a master regulator of MHC class II gene expression, and also controls IFNgamma-induced MHC-II expression (Alfonso et al., Int. J. Mol. Sci, (2021) 22 (3): 1074). Inhibition of MHC class II, including for the purpose of evading host immune response, can therefore be achieved by disrupting expression of CIITA. In several embodiments, immune cells are genetically edited to reduce (e.g., knockout) expression of CIITA. In several embodiments, T cells are genetically edited to reduce (e.g., knockout) expression of CIITA, thereby reducing allogenic HLA-II-mediated immunogenicity.

[0190] Provided herein are are immune cells (e.g., NK or T cells) comprising any combination of genetic edits as described herein. Combinations of editing are used in several embodiments, such as knockout of B2M and CIITA.

### Engineering Enhanced Persistence Through Immunosuppressive Effector(s)

[0191] Additional cellular editing strategies are provided for herein that serve to further enhance the persistence of allogeneic cellular therapy products, such as allogeneic CAR-T cells and/or allogeneic CAR-NK cells. As discussed herein, there are various strategies that can be employed to reduce the tendency of an allogeneic cell therapy product to induce host cell-mediated graft rejection.

[0192] For example, in several embodiments the expression of B2M (encoded by B2M) is reduced and/or eliminated in order to reduce the host-mediated graft rejection. In several embodiments, B2M expression is disrupted and/or knocked out using a Crispr-Cas mediated approach (e.g., Cas9) as disclosed elsewhere herein, but with the use of one more of the following B2M-specific guide RNAs: SEQ ID 290-CGCGAGCACAGCTAAGGCCA; SEQ ID 291-GAGTAGCGCGAGCACAGCTA; SEQ ID 292-GCTACTCTCTCTTTCTGGCC; SEQ ID 293-GGCCGAGATGTCTCGCTCCG; SEQ ID 294-GGCCACGGAGCGAGACATCT; SEQ ID 295-CACAGCCCAAGATAGTTAAG; SEQ ID 296-AGTCACATGGTTCACACGGC; SEQ ID 297-AAGTCAACTTCAATGTCGGA; SEQ ID 298-ACTTGTCTTTCAGCAAGGAC; and SEQ ID 299-TGGGCTGTGACAAAGTCACA.

[0193] Loss of expression of B2M induces a complete loss of HLA expression, which can reduce, and in some embodiments, eliminate, the host T-cell mediated graft rejection. However, this can also render the administered cells susceptible to host NK-cell mediated graft rejection (as well as to rejection by administered engineered NK cells, when a mixed NK/T cell population is used). This, as discussed above, results in loss of the KIR inhibitory signals (e.g., “missing self” signals). See FIGS. 8E-8I.

[0194] In some embodiments various proteins can be expressed on the surface of a cell to be administered to an allogeneic recipient in order to inhibit host (or administered) NK cells from targeting the administered NK and or T cells. In several embodiments, approaches involve the expression of, for example HLA-E/HLA-G expression, CD47, or one or more viral peptide/proteins, and combinations of these (among other disclosed herein).

[0195] In several embodiments, the expression of ADORA2A (Adenosine 2a Receptor; encoded by ADORA2) is reduced and/or eliminated in order to increase overall activation in resultant T cells and/or NK cells, or other cell type provided for herein. In several embodiments, ADORA2A is disrupted and/or knocked out using one or more of the gene editing methods disclosed herein. In several embodiments, ADORA2A is disrupted and/or knocked out using a Crispr-Cas mediated approach (e.g., Cas9) as disclosed elsewhere herein, with the Cas nuclease guided by the use of one more of the following ADORA2A-specific guide RNAs: SEQ ID NO: 503-506.

[0196] In several embodiments, gene editing reduces transcription of ADORA2A by about 30%, about 40%, about 50%, about 60%, about 70%, about 75%, about 80%, about 85%, about 90%, about 95%, about 97%, about 98%, about 99%, or more (including any amount between those listedIn several embodiments, gene editing reduces transcription of ADORA2A by at least about 30%, In several embodiments, gene editing reduces transcription of ADORA2 by at least about 40%, In several embodiments, gene editing reduces transcription of ADORA2 by at least about 50%, In several embodiments, gene editing reduces transcription of ADORA2 by at least about 60%, In several embodiments, gene editing reduces transcription of ADORA2 by at least about 70%, In several embodiments, gene editing reduces transcription of ADORA2 by at least about 80%, In several embodiments, gene editing reduces transcription of ADORA2 by at least about 90%,

[0197] In several embodiments, gene editing can reduce expression of a target protein by about 30%, about 40%, about 50%, about 60%, about 70%, about 75%, about 80%, about 85%, about 90%, about 95%, about 97%, about 98%, about 99%, or more (including any amount between those listed). In several embodiments, gene editing reduces expression of ADORA2A by about 30%, about 40%, about 50%, about 60%, about 70%, about 75%, about 80%, about 85%, about 90%, about 95%, about 97%, about 98%, about 99%, or more (including any amount between those listed). In several embodiments, gene editing reduces expression of ADORA2A by at least about 30%, In several embodiments, gene editing reduces expression of ADORA2A by at least about 40%, In several embodiments, gene editing reduces expression of ADORA2A by at least about 50%, In several embodiments, gene editing reduces expression of ADORA2A by at least about 60%, In several embodiments, gene editing reduces expression of ADORA2A by at least about 70%, In several embodiments, gene editing reduces expression of ADORA2A by at least about 80%, In several embodiments, gene editing reduces expression of ADORA2A by at least about 90%,

[0198] Loss of expression of ADORA2A induces decreased sensitivity to adenosine, a well-established immunosuppressant for T cells and NK cells (Young et al., Cancer Res. (2018) 78(4):1003-16; Cekic and Linden, Cancer Res. (2014) 74(24):7239-49). Thus, according to several embodiments, gene editing ADORA2A increases the cytotoxicity, persistence, immune avoidance or otherwise enhances the efficacy of engineered NK, T, or other cell as disclosed herein.

[0199] The tumor microenvironment (TME), as suggested with the nomenclature, is the environment around a tumor, which includes the surrounding blood vessels and capillaries, immune cells circulating through or retained in the area, fibroblasts, various signaling molecules related by the tumor cells, the immune cells or other cells in the area, as well as the surrounding extracellular matrix. Various mechanisms are employed by tumors to evade detection and/or destruction by host immune cells, including modification of the TME. Tumors may alter the TME by releasing extracellular signals, promoting tumor angiogenesis or even inducing immune tolerance, in part by limiting immune cell entry in the TME and/or limiting reproduction/expansion of immune cells in the TME. The tumor can also modify the extracellular matrix (ECM), which can allow pathways to develop for tumor extravasation to new sites. Transforming Growth-Factor beta (TGFb) has beneficial effects when reducing inflammation and preventing autoimmunity. However, it can also function to inhibit anti-tumor immune responses, and thus, upregulated expression of TGFb has been implicated in tumor progression and metastasis (Pickup et al., Nat. Rev. Cancer (2013) 13 (11): 788-99). TGFb signaling can inhibit the cytotoxic function of NK cells by interacting with the TGFb receptor expressed by NK cells, for example the TGFb receptor isoform II (TGFBR2), encoded by TGFBR2. In accordance with several embodiments disclosed herein, the reduction or elimination of expression of TGFBR2 through gene editing (e.g., by CRISPr/Cas9 guided by a TGFBR2 guide RNA) interrupts the inhibitory effect of TGFb on NK cells.

[0200] In NK cells, TGFBR2 is a potent checkpoint in NK cell-mediated tumor immunity, while for T cells, knockout of TGFBR2 rescues CAR T cell exhaustion induced by TGF-β1 (Tang et al., JCI Insight (2020) 5 (4): e133977). Thus, according to several embodiments, gene editing TGFBR2 increases the cytotoxicity, persistence, immune avoidance or otherwise enhances the efficacy of engineered NK, T, or other cell as disclosed herein.

[0201] As discussed herein, the CRISPR/Cas9 system may be used to specifically target and reduce the expression of the TGFBR2 by NK cells. Various non-limiting examples of guide RNAs are summarized below.

TABLE 1
TGFb Receptor Type 2 Isoform Guide RNAs

| SEQ | | | |
|---|---|---|---|
| ID NO: | Name | Sequence | Target |
| 147 | TGFBR2-1 | CCCCTACCATGACTTTATTC | Exon 4 |
| 148 | TGFBR2-2 | ATTGCACTCATCAGAGCTAC | Exon 4 |
| 149 | TGFBR2-3 | AGTCATGGTAGGGGAGCTTG | Exon 4 |
| 150 | TGFBR2-4 | TGCTGGCGATACGCGTCCAC | Exon 1 |
| 151 | TGFBR2-5 | GTGAGCAATCCCCCGGGCGA | Exon 4 |
| 152 | TGFBR2-6 | AACGTGCGGTGGGATCGTGC | Exon 1 |

[0202] In several embodiments, the expression of TGFBR2 (encoded by TGFBR2) is reduced and/or eliminated in order to increase overall activation in resultant T cells and/or NK cells, or other cell type provided for herein. In several embodiments, TGFBR2 is disrupted and/or knocked out using one or more of the gene editing methods disclosed herein. In several embodiments, TGFBR2 is disrupted and/or knocked out using a Crispr-Cas mediated approach (e.g., Cas9) as disclosed elsewhere herein, with the Cas nuclease guided by the use of one more of the following TGFBR2-specific guide RNAs: SEQ ID NO: 544-547: SEQ ID 544-TGGGCAGTCCTATTACAGCT; SEQ ID 545-ATGATAGTCACTGACAACAA; SEQ ID 546-AGTTGCTCATGCAGGATTTC; SEQ ID NO 547-GAAGCCACAGGAAGTCTGTG.

[0203] In several embodiments, gene editing reduces transcription of TGFBR2 by about 30%, about 40%, about 50%, about 60%, about 70%, about 75%, about 80%, about 85%, about 90%, about 95%, about 97%, about 98%, about 99%, or more (including any amount between those listed). In several embodiments, gene editing reduces transcription of TGFBR2 by at least about 30%, In several embodiments, gene editing reduces transcription of TGFBR2 by at least about 40%, In several embodiments, gene editing reduces transcription of TGFBR2 by at least about 50%, In several embodiments, gene editing reduces transcription of TGFBR2 by at least about 60%, In several embodiments, gene editing reduces transcription of TGFBR2 by at least about 70%, In several embodiments, gene editing reduces transcription of TGFBR2 by at least about 80%, In several embodiments, gene editing reduces transcription of TGFBR2 by at least about 90%.

[0204] In several embodiments, gene editing can reduce expression of a target protein by about 30%, about 40%, about 50%, about 60%, about 70%, about 75%, about 80%, about 85%, about 90%, about 95%, about 97%, about 98%, about 99%, or more (including any amount between those listed). In several embodiments, gene editing reduces expression of TGFBR2 by about 30%, about 40%, about 50%, about 60%, about 70%, about 75%, about 80%, about 85%, about 90%, about 95%, about 97%, about 98%, about 99%, or more (including any amount between those listed). In several embodiments, gene editing reduces expression of TGFBR2 by at least about 30%, In several embodiments, gene editing reduces expression of TGFBR2 by at least about 40%, In several embodiments, gene editing reduces expression of TGFBR2 by at least about 50%, In several embodiments, gene editing reduces expression of TGFBR2 by at least about 60%, In several embodiments, gene editing reduces expression of TGFBR2 by at least about 70%, In several embodiments, gene editing reduces expression of TGFBR2 by at least about 80%, In several embodiments, gene editing reduces expression of TGFBR2 by at least about 90%.

[0205] In accordance with additional embodiments, a disruption of, or elimination of, expression of a receptor, pathway or protein on an immune cell can result in the enhanced activity (e.g., cytotoxicity, persistence, etc.) of the immune cell against a target cancer cell. In several embodiments, this results from a disinhibition of the immune cell. Natural killer cells, express a variety of receptors, such particularly those within the Natural Killer Group 2 family of receptors. One such receptor, according to several embodiments disclosed herein, the NKG2D receptor, is used to generate cytotoxic signaling constructs that are expressed by NK cells and lead to enhanced anti-cancer activity of such NK cells. In addition, NK cells express the NKG2A receptor, which is an inhibitory receptor. One mechanism by which tumors develop resistance to immune cells is through the expression of peptide-loaded HLA Class I molecules (HLA-E), which suppresses the activity of NK cells through the ligation of the HLA-E with the NKG2A receptor. Thus, while one approach could be to block the interaction of the HLA-E with the expressed NKG2A receptors on NK cells, according to several embodiments disclosed herein, the expression of NKG2A is disrupted, which short circuits that inhibitory pathway and allows enhanced NK cell cytotoxicity.

[0206] Non-limiting examples of guide RNAs targeting NKG2A are shown below in Table 2.

TABLE 2
NKG2A Guide RNAs

| SEQ | | | |
|---|---|---|---|
| ID NO: | Name | Sequence | Target |
| 158 | NKG2A-1 | GGAGCTGATGGTAAATCTGC | Exon 4 |
| 159 | NKG2A-2 | TTGAAGGTTTAATTCCGCAT | Exon 3 |
| 160 | NKG2A-3 | AACAACTATCGTTACCACAG | Exon 4 |

[0207] In several embodiments, the expression of NKG2A (encoded by NKG2A also known as KLRC1) is reduced and/or eliminated in order to increase overall activation in resultant T cells and/or NK cells, or other cell type provided for herein. In several embodiments, NKG2A is disrupted and/or knocked out using one or more of the gene editing methods disclosed herein. In several embodiments, NKG2A is disrupted and/or knocked out using a Crispr-Cas mediated approach (e.g., Cas9) as disclosed elsewhere herein, with the Cas nuclease guided by the use of one more of the following NKG2A-specific guide RNAs: SEQ ID NO: 548-551: SEQ ID 548-GAAGCTCATTGTTGGGATCC; SEQ ID 549-AACAACTATCGTTACCACAG; SEQ ID NO 550-TGAACAGGAAATAACCTATG; SEQ ID NO 551-GGTTTTCGTTGCTGCCTCTT.

[0208] In several embodiments, gene editing reduces transcription of NKG2A by about 30%, about 40%, about 50%, about 60%, about 70%, about 75%, about 80%, about 85%, about 90%, about 95%, about 97%, about 98%, about 99%, or more (including any amount between those listed). In several embodiments, gene editing reduces transcription of NKG2A by at least about 30%. In several embodiments, gene editing reduces transcription of NKG2A by at least about 40%. In several embodiments, gene editing reduces transcription of NKG2A by at least about 50%.

[0209] In several embodiments, gene editing reduces transcription of NKG2A by at least about 60%. In several embodiments, gene editing reduces transcription of NKG2A by at least about 70%. In several embodiments, gene editing reduces transcription of NKG2A by at least about 80%. In several embodiments, gene editing reduces transcription of NKG2A by at least about 90%.

[0210] In several embodiments, gene editing can reduce expression of a target protein by about 30%, about 40%, about 50%, about 60%, about 70%, about 75%, about 80%, about 85%, about 90%, about 95%, about 97%, about 98%, about 99%, or more (including any amount between those listed). In several embodiments, gene editing reduces expression of NKG2A by about 30%, about 40%, about 50%, about 60%, about 70%, about 75%, about 80%, about 85%, about 90%, about 95%, about 97%, about 98%, about 99%, or more (including any amount between those listed). In several embodiments, gene editing reduces expression of NKG2A by at least about 30%. In several embodiments, gene editing reduces expression of NKG2A by at least about 40%. In several embodiments, gene editing reduces expression of NKG2A by at least about 50%. In several embodiments, gene editing reduces expression of NKG2A by at least about 60%. In several embodiments, gene editing reduces expression of NKG2A by at least about 70%. In several embodiments, gene editing reduces expression of NKG2A by at least about 80%. In several embodiments, gene editing reduces expression of NKG2A by at least about 90%.

[0211] NKG2A binds to HLA-E and is recognized as an MHC-recognizing receptor. Since NKG2A is an inhibitor receptor, loss of expression of NKG2A induces increased activation of constituent cells. In NK and T cells, loss of NKG2A leads to increased activation and cytotoxicity against HLA-E expressing tumor cells (Kamiya et al., J. Clin. Invest. (2019) 129 (5): 2094-2106). Thus, according to several embodiments, gene editing NKG2A increases the cytotoxicity, persistence, immune avoidance or otherwise enhances the efficacy of engineered NK, T, or other cell as disclosed herein.

[0212] Interleukins, in particular interleukin-15, are important in NK cell function and survival. Suppressor of cytokine signaling (SOCS) proteins are negative regulators of cytokine release by NK cells. The protein tyrosine phosphatase CD45 is an important regulator of NK cell activity through Src-family kinase activity. CD45 expression is involved in ITAM-specific NK-cell functions and processes such as degranulation, cytokine production, and expansion (Hesslein et al., Blood (2011) 117(11):3087-95). Thus, knockout of CD45 expression should result in less effective NK cells. As discussed above, CRISPR/Cas9 was used to disrupt expression of CD45 (encoded by PTPRC) and SOCS2 (encoded by SOCS2), though in additional embodiments, other gene editing approaches can be used. Non-limiting examples of PTPRC and SOCS2-targeting guide RNAs are shown below in Table 3.

TABLE 3
PTPRC and SOCS2 Guide RNAs

| SEQ ID NO: | Name | Sequence | Target |
|---|---|---|---|
| 170 | PTPRC-1 | AGTGCTGGTGTTGGGCGCAC | Exon 25 |
| 171 | SOCS2-1 | GTGAACAGTGCCGTTCCGGGGGG | Exon 3 |
| 172 | SOCS2-2 | GGCACCGGTACATTTGTTAATGG | Exon 3 |
| 173 | SOCS2-3 | TTCGCCAGACGCGCCGCCTGCGG | Exon 2 |

[0213] In several embodiments, gene editing reduces transcription of PTPRC by about 30%, about 40%, about 50%, about 60%, about 70%, about 75%, about 80%, about 85%, about 90%, about 95%, about 97%, about 98%, about 99%, or more (including any amount between those listed). In several embodiments, gene editing reduces transcription of PTPRC by at least about 30%. In several embodiments, gene editing reduces transcription of PTPRC by at least about 40%. In several embodiments, gene editing reduces transcription of PTPRC by at least about 50%. In several embodiments, gene editing reduces transcription of PTPRC by at least about 60%. In several embodiments, gene editing reduces transcription of PTPRC by at least about 70%. In several embodiments, gene editing reduces transcription of PTPRC by at least about 80%. In several embodiments, gene editing reduces transcription of PTPRC by at least about 90%.

[0214] In several embodiments, gene editing can reduce expression of a target protein by about 30%, about 40%, about 50%, about 60%, about 70%, about 75%, about 80%, about 85%, about 90%, about 95%, about 97%, about 98%, about 99%, or more (including any amount between those listed). In several embodiments, gene editing reduces expression of CD45 by about 30%, about 40%, about 50%, about 60%, about 70%, about 75%, about 80%, about 85%, about 90%, about 95%, about 97%, about 98%, about 99%, or more (including any amount between those listed). In several embodiments, gene editing reduces expression of CD45 by at least about 30%. In several embodiments, gene editing reduces expression of CD45 by at least about 40%. In several embodiments, gene editing reduces expression of CD45 by at least about 50%. In several embodiments, gene editing reduces expression of CD45 by at least about 60%. In several embodiments, gene editing reduces expression of CD45 by at least about 70%. In several embodiments, gene editing reduces expression of CD45 by at least about 80%. In several embodiments, gene editing reduces expression of CD45 by at least about 90%.

[0215] In several embodiments, the expression of Cytokine Signaling 2 (SOCS2) is reduced and/or eliminated in order to increase overall activation in resultant T cells and/or NK cells, or other cell type provided for herein. In several embodiments, SOCS2 is disrupted and/or knocked out using one or more of the gene editing methods disclosed herein. In several embodiments, SOCS2 is disrupted and/or knocked out using a Crispr-Cas mediated approach (e.g., Cas9) as disclosed elsewhere herein, with the Cas nuclease guided by the use of one more of the following SOCS2-specific guide RNAs: SEQ ID NO: 556-561: SEQ ID NO 556-CTTCGAATCGAATACCAAGA; SEQ ID NO 557-GCTTAAACAATTTGACAGTG; SEQ ID NO 558-CCAAGACGGAAAATTCAGAT; SEQ ID NO 559-CCAATCTGAATTTTCCGTCT; SEQ ID NO 560-CGGTCCAGCTGACGTCTTAA; SEQ ID NO 561-CATCTTGGTACTCAATCCGC.

[0216] In several embodiments, gene editing reduces transcription of SOCS2 by about 30%, about 40%, about 50%, about 60%, about 70%, about 75%, about 80%, about 85%, about 90%, about 95%, about 97%, about 98%, about 99%, or more (including any amount between those listed). In several embodiments, gene editing reduces transcription of SOCS2 by at least about 30%. In several embodiments, gene editing reduces transcription of SOCS2 by at least about 40%. In several embodiments, gene editing reduces transcription of SOCS2 by at least about 50%. In several embodiments, gene editing reduces transcription of SOCS2 by at least about 60%. In several embodiments, gene editing reduces transcription of SOCS2 by at least about 70%. In several embodiments, gene editing reduces transcription of SOCS2 by at least about 80%. In several embodiments, gene editing reduces transcription of SOCS2 by at least about 90%.

[0217] In several embodiments, gene editing can reduce expression of a target protein by about 30%, about 40%, about 50%, about 60%, about 70%, about 75%, about 80%, about 85%, about 90%, about 95%, about 97%, about 98%, about 99%, or more (including any amount between those listed). In several embodiments, gene editing reduces expression of SOCS2 by about 30%, about 40%, about 50%, about 60%, about 70%, about 75%, about 80%, about 85%, about 90%, about 95%, about 97%, about 98%, about 99%, or more (including any amount between those listed). In several embodiments, gene editing reduces expression of SOCS2 by at least about 30%. In several embodiments, gene editing reduces expression of SOCS2 by at least about 40%. In several embodiments, gene editing reduces expression of SOCS2 by at least about 50%. In several embodiments, gene editing reduces expression of SOCS2 by at least about 60%. In several embodiments, gene editing reduces expression of SOCS2 by at least about 70%. In several embodiments, gene editing reduces expression of SOCS2 by at least about 80%. In several embodiments, gene editing reduces expression of SOCS2 by at least about 90%.

[0218] SOCS proteins are negative regulators of cytokine responses, and SOCS2 specifically negatively regulates the development of NK cells through inhibiting JAK2 activity. Loss of expression of SOCS2 in NK cells induces increased NK cell development and overall cytotoxicity (Kim et al., Scientific Reports (2017) 7:46153). Thus, according to several embodiments, gene editing SOCS2 increases the cytotoxicity, persistence, immune avoidance or otherwise enhances the efficacy of engineered NK, T, or other cell as disclosed herein.

[0219] In several embodiments, the expression of Casitas B-lineage lymphoma-b (Cbl-b; encoded by CBLB) is reduced and/or eliminated in order to increase overall activation in resultant T cells and/or NK cells, or other cell type provided for herein. In several embodiments, Cbl-b is disrupted and/or knocked out using one or more of the gene editing methods disclosed herein. In several embodiments, CBLB is disrupted and/or knocked out using a Crispr-Cas mediated approach (e.g., Cas9) as disclosed elsewhere herein, with the Cas nuclease guided by the use of one more of the following CBLB-specific guide RNAs: In several embodiments, the expression of Casitas B-lineage lymphoma-b (Cbl-b) is reduced and/or eliminated in order to increase overall activation in resultant T cells and NK cells. In several embodiments, CBLB is disrupted and/or knocked out using a Crispr-Cas mediated approach (e.g., Cas9) as disclosed elsewhere herein, but with the use of one more of the following Cbl-b-specific guide RNAs: SEQ ID NO: 552-555: SEQ ID 552-TCCCCGAAAAGGTCGAATTT; SEQ ID 553-ATCTGCGGCAGCTTGCTTAG; SEQ ID 554-GGGTATTATTGATGCTATTC; SEQ ID 555-GATTTCCTCCTCGACCACCA.

[0220] Further non-limiting examples of CBLB-targeting guide RNAs are shown below in Table 4.

TABLE 4
CBLB Guide RNAs

| SEQ | | | |
|---|---|---|---|
| ID NO: | Name | Sequence | Target |
| 164 | CBLB-1 | TAATCTGGTGGACCTCATGAAGG | Exon 5 |
| 165 | CBLB-2 | TCGGTTGGCAAACGTCCGAAAGG | Exon 10 |
| 166 | CBLB-3 | AGCAAGCTGCCGCAGATCGCAGG | Exon 2 |

[0221] In several embodiments, gene editing reduces transcription of CBLB by about 30%, about 40%, about 50%, about 60%, about 70%, about 75%, about 80%, about 85%, about 90%, about 95%, about 97%, about 98%, about 99%, or more (including any amount between those listed). In several embodiments, gene editing reduces transcription of CBLB by at least about 30%. In several embodiments, gene editing reduces transcription of CBLB by at least about 40%. In several embodiments, gene editing reduces transcription of CBLB by at least about 50%. In several embodiments, gene editing reduces transcription of CBLB by at least about 60%. In several embodiments, gene editing reduces transcription of CBLB by at least about 70%. In several embodiments, gene editing reduces transcription of CBLB by at least about 80%. In several embodiments, gene editing reduces transcription of CBLB by at least about 90%.

[0222] In several embodiments, gene editing can reduce expression of a target protein (e.g., Cbl-b) by about 30%, about 40%, about 50%, about 60%, about 70%, about 75%, about 80%, about 85%, about 90%, about 95%, about 97%, about 98%, about 99%, or more (including any amount between those listed). In several embodiments, gene editing reduces expression of Cbl-b by about 30%, about 40%, about 50%, about 60%, about 70%, about 75%, about 80%, about 85%, about 90%, about 95%, about 97%, about 98%, about 99%, or more (including any amount between those listed). In several embodiments, gene editing reduces expression of Cbl-b by at least about 30%. In several embodiments, gene editing reduces expression of Cbl-b by at least about 40%. In several embodiments, gene editing reduces expression of Cbl-b by at least about 50%. In several embodiments, gene editing reduces expression of Cbl-b by at least about 60%. In several embodiments, gene editing reduces expression of Cbl-b by at least about 70%. In several embodiments, gene editing reduces expression of Cbl-b by at least about 80%. In several embodiments, gene editing reduces expression of Cbl-b by at least about 90%.

[0223] Cbl-b is an E3 ubiquitin ligase that negatively regulates T cell activation Loss of expression of Cbl-b in NK cells and T cells demonstrate increased antitumor immunity. Moreover, Cbl-b deficient T cells and NK cells are resistant to PD-L1/PD-1 mediated suppression (Fujiwara et al., Front. Immunol. (2017) 8: 42). Thus, according to several embodiments, gene editing Cbl-b increases the cytotoxicity, persistence, immune avoidance or otherwise enhances the efficacy of engineered NK, T, or other cell as disclosed herein.

[0224] Another E3 ubiquitin ligase, TRIpartite Motif-containing protein 29 (TRIM29; encoded by TRIM29), is a negative regulator of NK cell functions (Dou et al., J. Immunol. (2019) 203(4):873-80). TRIM29 is generally not expressed by resting NK cells, but is readily upregulated following activation (in particular by IL-12/IL-18 stimulation). As discussed herein, CRISPR/Cas9 can also be used to disrupt expression of TRIM29, though in additional embodiments, other gene editing approaches can be used. Non-limiting examples of TRIM29-targeting guide RNAs are shown below in Table 5.

TABLE 5
TRIM29 Guide RNAs

| SEQ | | | |
|---|---|---|---|
| ID NO: | Name | Sequence | Target |
| 167 | TRIM29-1 | GAACGGTAGGTCCCCTCTCGTGG | Exon 4 |
| 168 | TRIM29-2 | AGCTGCCTTGGACGACGGGCAGG | Exon 7 |
| 169 | TRIM29-3 | TGAGCCGTAACTTCATTGAGAGG | Exon 4 |

[0225] In several embodiments, gene editing reduces transcription of TRIM29 by about 30%, about 40%, about 50%, about 60%, about 70%, about 75%, about 80%, about 85%, about 90%, about 95%, about 97%, about 98%, about 99%, or more (including any amount between those listed). In several embodiments, gene editing reduces transcription of TRIM29 by at least about 30%. In several embodiments, gene editing reduces transcription of TRIM29 by at least about 40%. In several embodiments, gene editing reduces transcription of TRIM29 by at least about 50%. In several embodiments, gene editing reduces transcription of TRIM29 by at least about 60%. In several embodiments, gene editing reduces transcription of TRIM29 by at least about 70%. In several embodiments, gene editing reduces transcription of TRIM29 by at least about 80%. In several embodiments, gene editing reduces transcription of TRIM29 by at least about 90%.

[0226] In several embodiments, gene editing can reduce expression of a target protein (e.g., TRIM29) by about 30%, about 40%, about 50%, about 60%, about 70%, about 75%, about 80%, about 85%, about 90%, about 95%, about 97%, about 98%, about 99%, or more (including any amount between those listed). In several embodiments, gene editing reduces expression of TRIM29 by about 30%, about 40%, about 50%, about 60%, about 70%, about 75%, about 80%, about 85%, about 90%, about 95%, about 97%, about 98%, about 99%, or more (including any amount between those listed). In several embodiments, gene editing reduces expression of TRIM29 by at least about 30%. In several embodiments, gene editing reduces expression of TRIM29 by at least about 40%. In several embodiments, gene editing reduces expression of TRIM29 by at least about 50%. In several embodiments, gene editing reduces expression of TRIM29 by at least about 60%. In several embodiments, gene editing reduces expression of TRIM29 by at least about 70%. In several embodiments, gene editing reduces expression of TRIM29 by at least about 80%. In several embodiments, gene editing reduces expression of TRIM29 by at least about 90%.

[0227] In several embodiments, the expression of Beta-2 Microglobulin (B2-microglobulin; encoded by B2M) is reduced and/or eliminated in order to increase overall activation in resultant T cells and/or NK cells, or other cell type provided for herein. In several embodiments, B2M is disrupted and/or knocked out using one or more of the gene editing methods disclosed herein. In several embodiments, B2M is disrupted and/or knocked out using a Crispr-Cas mediated approach (e.g., Cas9) as disclosed elsewhere herein, with the Cas nuclease guided by the use of one more of the following B2M-specific guide RNAs: SEQ ID NO: 290-299: SEQ ID 290-CGCGAGCACAGCTAAGGCCA; SEQ ID 291-GAGTAGCGCGAGCACAGCTA; SEQ ID 292-GCTACTCTCTCTTTCTGGCC; SEQ ID 293-GGCCGAGATGTCTCGCTCCG; SEQ ID 294-GGCCACGGAGCGAGACATCT; SEQ ID 295-CACAGCCCAAGATAGTTAAG; SEQ ID 296-AGTCACATGGTTCACACGGC; SEQ ID 297-AAGTCAACTTCAATGTCGGA; SEQ ID 298-ACTTGTCTTTCAGCAAGGAC; SEQ ID 299-TGGGCTGTGACAAAGTCACA.

[0228] In several embodiments, gene editing reduces transcription of B2M by about 30%, about 40%, about 50%, about 60%, about 70%, about 75%, about 80%, about 85%, about 90%, about 95%, about 97%, about 98%, about 99%, or more (including any amount between those listed). In several embodiments, gene editing reduces transcription of B2M by at least about 30%. In several embodiments, gene editing reduces transcription of B2M by at least about 40%. In several embodiments, gene editing reduces transcription of B2M by at least about 50%. In several embodiments, gene editing reduces transcription of B2M by at least about 60%. In several embodiments, gene editing reduces transcription of B2M by at least about 70%. In several embodiments, gene editing reduces transcription of B2M by at least about 80%. In several embodiments, gene editing reduces transcription of B2M by at least about 90%.

[0229] In several embodiments, gene editing can reduce expression of a target protein by about 30%, about 40%, about 50%, about 60%, about 70%, about 75%, about 80%, about 85%, about 90%, about 95%, about 97%, about 98%, about 99%, or more (including any amount between those listed). In several embodiments, gene editing reduces expression of B2M by about 30%, about 40%, about 50%, about 60%, about 70%, about 75%, about 80%, about 85%, about 90%, about 95%, about 97%, about 98%, about 99%, or more (including any amount between those listed). In several embodiments, gene editing reduces expression of B2M by at least about 30%. In several embodiments, gene editing reduces expression of B2M by at least about 40%. In several embodiments, gene editing reduces expression of B2M by at least about 50%. In several embodiments, gene editing reduces expression of B2M by at least about 60%. In several embodiments, gene editing reduces expression of B2M by at least about 70%. In several embodiments, gene editing reduces expression of B2M by at least about 80%. In several embodiments, gene editing reduces expression of B2M by at least about 90%.

[0230] Loss of expression of B2-microglobulin induces greatly reduced levels of MHC class I molecules, and in both NK cells and T cells, reduction of B2-microglobulin can modulate overall cell recognition of autologous and allogenic cells. Thus, according to several embodiments, gene editing B2M increases the cytotoxicity, persistence, immune avoidance or otherwise enhances the efficacy of engineered NK, T, or other cell as disclosed herein.

[0231] In several embodiments, the expression of T cell immunoreceptor with Ig and ITIM domains (TIGIT; encoded by TIGIT) is reduced and/or eliminated in order to increase overall activation in resultant T cells and/or NK cells, or other cell type provided for herein. In several embodiments, TIGIT is disrupted and/or knocked out using one or more of the gene editing methods disclosed herein. In several embodiments, TIGIT is disrupted and/or knocked out using a Crispr-Cas mediated approach (e.g., Cas9) as disclosed elsewhere herein, with the Cas nuclease guided by the use of one more of the following TIGIT-specific guide RNAs: SEQ ID NO: 507-510: SEQ ID NO 507-GTACTCCCCTGTATCGTTCA; SEQ ID NO 508-TGGGGCCACTCGATCCTTGA; SEQ ID NO 509-ACCTATCATACGTATCCTGG; SEQ ID NO 510-AGTGTACGTCCCATCAGGGT.

[0232] In several embodiments, gene editing reduces transcription of TIGIT by about 30%, about 40%, about 50%, about 60%, about 70%, about 75%, about 80%, about 85%, about 90%, about 95%, about 97%, about 98%, about 99%, or more (including any amount between those listed). In several embodiments, gene editing reduces transcription of TIGIT by at least about 30%. In several embodiments, gene editing reduces transcription of TIGIT by at least about 40%. In several embodiments, gene editing reduces transcription of TIGIT by at least about 50%. In several embodiments, gene editing reduces transcription of TIGIT by at least about 60%. In several embodiments, gene editing reduces transcription of TIGIT by at least about 70%. In several embodiments, gene editing reduces transcription of TIGIT by at least about 80%. In several embodiments, gene editing reduces transcription of TIGIT by at least about 90%.

[0233] In several embodiments, gene editing can reduce expression of a target protein by about 30%, about 40%, about 50%, about 60%, about 70%, about 75%, about 80%, about 85%, about 90%, about 95%, about 97%, about 98%, about 99%, or more (including any amount between those listed). In several embodiments, gene editing reduces expression of TIGIT by about 30%, about 40%, about 50%, about 60%, about 70%, about 75%, about 80%, about 85%, about 90%, about 95%, about 97%, about 98%, about 99%, or more (including any amount between those listed). In several embodiments, gene editing reduces expression of TIGIT by at least about 30%. In several embodiments, gene editing reduces expression of TIGIT by at least about 40%. In several embodiments, gene editing reduces expression of TIGIT by at least about 50%. In several embodiments, gene editing reduces expression of TIGIT by at least about 60%. In several embodiments, gene editing reduces expression of TIGIT by at least about 70%. In several embodiments, gene editing reduces expression of TIGIT by at least about 80%. In several embodiments, gene editing reduces expression of TIGIT by at least about 90%.

[0234] TIGIT is a checkpoint receptor associated with T cell and NK cell exhaustion. Loss of expression of TIGIT in NK cells prevents NK cell exhaustion and promotes NK cell-dependent tumor immunity (Zhang et al., Nat. Immunol. (2018) 19(7):723-32). Loss of expression of TIGIT in T cells can similarly lead to downstream activation of resultant T cells. Thus, according to several embodiments, gene editing TIGIT increases the cytotoxicity, persistence, immune avoidance or otherwise enhances the efficacy of engineered NK, T, or other cell as disclosed herein.

[0235] In several embodiments, the expression of Programmed cell death protein-1 (PD-1; encoded by PDCD1) is reduced and/or eliminated in order to increase overall activation in resultant T cells and/or NK cells, or other cell type provided for herein. In several embodiments, PDCD1 is disrupted and/or knocked out using one or more of the gene editing methods disclosed herein. In several embodiments, PDCD1 is disrupted and/or knocked out using a Crispr-Cas mediated approach (e.g., Cas9) as disclosed elsewhere herein, with the Cas nuclease guided by the use of one more of the following PDCD1-specific guide RNAs: SEQ ID NO: 511-514: SEQ ID NO 511-ATGTGGAAGTCACGCCCGTT; SEQ ID NO 512-GCAGTTGTGTGACACGGAAG; SEQ ID NO 513-CAGCTTGTCCAACTGGTCGG; SEQ ID NO 514-AGTTGAGCTGGCAATCAGGG.

[0236] In several embodiments, gene editing reduces transcription of PDCD1 by about 30%, about 40%, about 50%, about 60%, about 70%, about 75%, about 80%, about 85%, about 90%, about 95%, about 97%, about 98%, about 99%, or more (including any amount between those listed). In several embodiments, gene editing reduces transcription of PDCD1 by at least about 30%. In several embodiments, gene editing reduces transcription of PDCD1 by at least about 40%. In several embodiments, gene editing reduces transcription of PDCD1 by at least about 50%. In several embodiments, gene editing reduces transcription of PDCD1 by at least about 60%. In several embodiments, gene editing reduces transcription of PDCD1 by at least about 70%. In several embodiments, gene editing reduces transcription of PDCD1 by at least about 80%. In several embodiments, gene editing reduces transcription of PDCD1 by at least about 90%.

[0237] In several embodiments, gene editing can reduce expression of a target protein by about 30%, about 40%, about 50%, about 60%, about 70%, about 75%, about 80%, about 85%, about 90%, about 95%, about 97%, about 98%, about 99%, or more (including any amount between those listed). In several embodiments, gene editing reduces expression of PD-1 by about 30%, about 40%, about 50%, about 60%, about 70%, about 75%, about 80%, about 85%, about 90%, about 95%, about 97%, about 98%, about 99%, or more (including any amount between those listed). In several embodiments, gene editing reduces expression of PD-1 by at least about 30%. In several embodiments, gene editing reduces expression of PD-1 by at least about 40%. In several embodiments, gene editing reduces expression of PD-1 by at least about 50%. In several embodiments, gene editing reduces expression of PD-1 by at least about 60%. In several embodiments, gene editing reduces expression of PD-1 by at least about 70%. In several embodiments, gene editing reduces expression of PD-1 by at least about 80%. In several embodiments, gene editing reduces expression of PD-1 by at least about 90%.

[0238] PD-1 plays an inhibitory role in immune regulation and down-regulates overall function by suppressing immune cell activity. Loss of expression of PD-1 in NK cells increases overall cytotoxicity due to increased secretion of interferon-gamma, granzyme B, and perforin (Niu et al., Int. J. Med. Sci. (2020) 17 (13): 1964-73). Similarly, T cells with loss of expression of PD-1 demonstrate increased cytotoxicity and overall caspase activation (Zhao et al., Ocotarget (2018) 9(4):5208-15). Thus, according to several embodiments, gene editing PDCD1 increases the cytotoxicity, persistence, immune avoidance or otherwise enhances the efficacy of engineered NK, T, or other cell as disclosed herein.

[0239] In several embodiments, the expression of T-cell immunoglobulin and mucin-domain containing-3 (TIM-3; encoded by HAVCR2) is reduced and/or eliminated in order to increase overall activation in resultant T cells and/or NK cells, or other cell type provided for herein. In several embodiments, HAVCR2 is disrupted and/or knocked out using one or more of the gene editing methods disclosed herein. In several embodiments, HAVCR2 is disrupted and/or knocked out using a Crispr-Cas mediated approach (e.g., Cas9) as disclosed elsewhere herein, with the Cas nuclease guided by the use of one more of the following HAVCR2-specific guide RNAs: SEQ ID NO:515-518: SEQ ID NO 515-AGAAGTGGAATACAGAGCGG; SEQ ID NO 516-AATGTGACTCTAGCAGACAG; SEQ ID NO 517-CTAAATGGGGATTTCCGCAA; SEQ ID NO 518-GAGTCACATTCTCTATGGTC.

[0240] In several embodiments, gene editing reduces transcription of HAVCR2 by about 30%, about 40%, about 50%, about 60%, about 70%, about 75%, about 80%, about 85%, about 90%, about 95%, about 97%, about 98%, about 99%, or more (including any amount between those listed). In several embodiments, gene editing reduces transcription of HAVCR2 by at least about 30%. In several embodiments, gene editing reduces transcription of HAVCR2 by at least about 40%. In several embodiments, gene editing reduces transcription of HAVCR2 by at least about 50%. In several embodiments, gene editing reduces transcription of HAVCR2 by at least about 60%. In several embodiments, gene editing reduces transcription of HAVCR2 by at least about 70%. In several embodiments, gene editing reduces transcription of HAVCR2 by at least about 80%. In several embodiments, gene editing reduces transcription of HAVCR2 by at least about 90%.

[0241] In several embodiments, gene editing can reduce expression of a target protein by about 30%, about 40%, about 50%, about 60%, about 70%, about 75%, about 80%, about 85%, about 90%, about 95%, about 97%, about 98%, about 99%, or more (including any amount between those listed). In several embodiments, gene editing reduces expression of TIM-3 by about 30%, about 40%, about 50%, about 60%, about 70%, about 75%, about 80%, about 85%, about 90%, about 95%, about 97%, about 98%, about 99%, or more (including any amount between those listed). In several embodiments, gene editing reduces expression of TIM-3 by at least about 30%. In several embodiments, gene editing reduces expression of TIM-3 by at least about 40%. In several embodiments, gene editing reduces expression of TIM-3 by at least about 50%. In several embodiments, gene editing reduces expression of TIM-3 by at least about 60%. In several embodiments, gene editing reduces expression of TIM-3 by at least about 70%. In several embodiments, gene editing reduces expression of TIM-3 by at least about 80%. In several embodiments, gene editing reduces expression of TIM-3 by at least about 90%.

[0242] TIM-3 is an inhibitory receptor involved in immune checkpoint function. Loss of expression of TIM-3 increases overall cytotoxicity in engineered NK and T cells as well as decreased exhaustion of NK cells and T cells, leading to increased effector function of constituent cells lacking TIM-3 expression (Pires de Silva et al., Cancer Imunol. Res. (2014) 2(5):410-22). Thus, according to several embodiments, gene editing HAVCR2 increases the cytotoxicity, persistence, immune avoidance or otherwise enhances the efficacy of engineered NK, T, or other cell as disclosed herein.

[0243] In several embodiments, the expression of CD38 (encoded by CD38) is reduced and/or eliminated in order to increase overall activation in resultant T cells and/or NK cells, or other cell type provided for herein. In several embodiments, CD38 is disrupted and/or knocked out using one or more of the gene editing methods disclosed herein. In several embodiments, CD38 is disrupted and/or knocked out using a Crispr-Cas mediated approach (e.g., Cas9) as disclosed elsewhere herein, with the Cas nuclease guided by the use of one more of the following CD38-specific guide RNAs: SEQ ID NO:519-522: SEQ ID NO 519-TGTACTTGACGCATCGCGCC; SEQ ID NO 520-TACTGACGCCAAGACAGAGT; SEQ ID NO 521-TATCAGCCACTAATGAAGTT; SEQ ID NO 522-TGTAGACTGCCAAAGTGTAT.

[0244] In several embodiments, gene editing reduces transcription of CD38 by about 30%, about 40%, about 50%, about 60%, about 70%, about 75%, about 80%, about 85%, about 90%, about 95%, about 97%, about 98%, about 99%, or more (including any amount between those listed). In several embodiments, gene editing reduces transcription of CD38 by at least about 30%. In several embodiments, gene editing reduces transcription of CD38 by at least about 40%. In several embodiments, gene editing reduces transcription of CD38 by at least about 50%. In several embodiments, gene editing reduces transcription of CD38 by at least about 60%. In several embodiments, gene editing reduces transcription of CD38 by at least about 70%. In several embodiments, gene editing reduces transcription of CD38 by at least about 80%. In several embodiments, gene editing reduces transcription of CD38 by at least about 90%.

[0245] In several embodiments, gene editing can reduce expression of a target protein by about 30%, about 40%, about 50%, about 60%, about 70%, about 75%, about 80%, about 85%, about 90%, about 95%, about 97%, about 98%, about 99%, or more (including any amount between those listed). In several embodiments, gene editing reduces expression of CD38 by about 30%, about 40%, about 50%, about 60%, about 70%, about 75%, about 80%, about 85%, about 90%, about 95%, about 97%, about 98%, about 99%, or more (including any amount between those listed). In several embodiments, gene editing reduces expression of CD38 by at least about 30%. In several embodiments, gene editing reduces expression of CD38 by at least about 40%. In several embodiments, gene editing reduces expression of CD38 by at least about 50%. In several embodiments, gene editing reduces expression of CD38 by at least about 60%. In several embodiments, gene editing reduces expression of CD38 by at least about 70%. In several embodiments, gene editing reduces expression of CD38 by at least about 80%. In several embodiments, gene editing reduces expression of CD38 by at least about 90%.

[0246] CD38 plays a role in the maturation cycle of immune cells, and blood cancers can often present upregulated CD38. Loss of CD38 expression on constituent NK cells allows for greater cytotoxicity due to decreased fratricide (Nagai et al., Blood (2019) 134 (suppl. 1): 870). Wild-type NK cells self-express CD38, leading to downstream self-targeting effects in wild-type NK cells. For T cells, loss of CD38 expression for constituent T cells leads to increased cytotoxicity. Thus, according to several embodiments, gene editing CD38 increases the cytotoxicity, persistence, immune avoidance or otherwise enhances the efficacy of engineered NK, T, or other cell as disclosed herein.

[0247] In several embodiments, the expression of T cell receptor alpha (TCRα or TRAC; encoded by TRAC) is reduced and/or eliminated in order to increase overall activation in resultant T cells and/or NK cells, or other cell type provided for herein. In several embodiments, TRAC is disrupted and/or knocked out using one or more of the gene editing methods disclosed herein. In several embodiments, TRAC is disrupted and/or knocked out using a Crispr-Cas mediated approach (e.g., Cas9) as disclosed elsewhere herein, with the Cas nuclease guided by the use of one more of the following TRAC-specific guide RNAs: SEQ ID NO:566-569: SEQ ID NO 566-TTGCCGGCTGAGAACCAGAT; SEQ ID NO 567-GAGAAGTAGCAGCCATGTAC; SEQ ID NO 568-GCCCATAGGTGAAGGCGTCT; SEQ ID NO 569-CCAATCATGCTGCTGGTGGA.

[0248] In several embodiments, gene editing reduces transcription of TRAC by about 30%, about 40%, about 50%, about 60%, about 70%, about 75%, about 80%, about 85%, about 90%, about 95%, about 97%, about 98%, about 99%, or more (including any amount between those listed). In several embodiments, gene editing reduces transcription of TRAC by at least about 30%. In several embodiments, gene editing reduces transcription of TRAC by at least about 40%. In several embodiments, gene editing reduces transcription of TRAC by at least about 50%. In several embodiments, gene editing reduces transcription of TRAC by at least about 60%. In several embodiments, gene editing reduces transcription of TRAC by at least about 70%. In several embodiments, gene editing reduces transcription of TRAC by at least about 80%. In several embodiments, gene editing reduces transcription of TRAC by at least about 90%.

[0249] In several embodiments, gene editing can reduce expression of a target protein by about 30%, about 40%, about 50%, about 60%, about 70%, about 75%, about 80%, about 85%, about 90%, about 95%, about 97%, about 98%, about 99%, or more (including any amount between those listed). In several embodiments, gene editing reduces expression of TRAC by about 30%, about 40%, about 50%, about 60%, about 70%, about 75%, about 80%, about 85%, about 90%, about 95%, about 97%, about 98%, about 99%, or more (including any amount between those listed). In several embodiments, gene editing reduces expression of TRAC by at least about 30%. In several embodiments, gene editing reduces expression of TRAC by at least about 40%. In several embodiments, gene editing reduces expression of TRAC by at least about 50%. In several embodiments, gene editing reduces expression of TRAC by at least about 60%. In several embodiments, gene editing reduces expression of TRAC by at least about 70%. In several embodiments, gene editing reduces expression of TRAC by at least about 80%. In several embodiments, gene editing reduces expression of TRAC by at least about 90%.

[0250] T cell receptors (TCR) are protein complexes found on T cells responsible for recognizing MHC molecules. A TCR is comprised of TCR alpha and beta subunits or TCR delta and gamma subunits. Loss of certain TCRs and preferential expression of other TCRs can lead to increased cytotoxicity in engineered cells due to increased selective targeting and recognition by constituent cells. Thus, according to several embodiments, gene editing TCR (e.g., by knockout of TRAC), increases the cytotoxicity, persistence, immune avoidance or otherwise enhances the efficacy of engineered NK, T, or other cell as disclosed herein.

[0251] In several embodiments, the expression of CISH (encoded by CISH, also known as CIS and CIS-1) is reduced and/or eliminated in order to increase overall activation in resultant T cells and/or NK cells, or other cell type provided for herein. In several embodiments, CISH is disrupted and/or knocked out using one or more of the gene editing methods disclosed herein. As discussed herein, CRISPr/CAs9 can be used to disrupt expression of CISH, though in additional embodiments, other gene editing approaches can be used. Non-limiting examples of CISH-targeting guide RNAs are shown below in Table 6.

TABLE 6
CISH Guide RNAs

| SEQ | | | |
|---|---|---|---|
| ID NO: | Name | Sequence | Target |
| 153 | CISH-1 | CTCACCAGATTCCCGAAGGT | Exon 2 |
| 154 | CISH-2 | CCGCCTTGTCATCAACCGTC | Exon 3 |
| 155 | CISH-3 | TCTGCGTTCAGGGGTAAGCG | Exon 1 |
| 156 | CISH-4 | GCGCTTACCCCTGAACGCAG | Exon 1 |
| 157 | CISH-5 | CGCAGAGGACCATGTCCCCG | Exon 1 |

[0252] In several embodiments, CISH is disrupted and/or knocked out using a Crispr-Cas mediated approach (e.g., Cas9) as disclosed elsewhere herein, with the Cas nuclease guided by the use of one more of the following CISH-specific guide RNAs: SEQ ID NO: 562-565, or other guide disclosed herein: SEQ ID NO 566-TTGCCGGCTGAGAACCAGAT; SEQ ID NO 567-GAGAAGTAGCAGCCATGTAC; SEQ ID NO 568-GCCCATAGGTGAAGGCGTCT; SEQ ID NO 569-CCAATCATGCTGCTGGTGGA.

[0253] In several embodiments, gene editing reduces transcription of CISH by about 30%, about 40%, about 50%, about 60%, about 70%, about 75%, about 80%, about 85%, about 90%, about 95%, about 97%, about 98%, about 99%, or more (including any amount between those listed). In several embodiments, gene editing reduces transcription of CISH by at least about 30%. In several embodiments, gene editing reduces transcription of CISH by at least about 40%. In several embodiments, gene editing reduces transcription of CISH by at least about 50%. In several embodiments, gene editing reduces transcription of CISH by at least about 60%. In several embodiments, gene editing reduces transcription of CISH by at least about 70%. In several embodiments, gene editing reduces transcription of CISH by at least about 80%. In several embodiments, gene editing reduces transcription of CISH by at least about 90%.

[0254] In several embodiments, gene editing can reduce expression of a target protein by about 30%, about 40%, about 50%, about 60%, about 70%, about 75%, about 80%, about 85%, about 90%, about 95%, about 97%, about 98%, about 99%, or more (including any amount between those listed). In several embodiments, gene editing reduces expression of CISH by about 30%, about 40%, about 50%, about 60%, about 70%, about 75%, about 80%, about 85%, about 90%, about 95%, about 97%, about 98%, about 99%, or more (including any amount between those listed). In several embodiments, gene editing reduces expression of CISH by at least about 30%. In several embodiments, gene editing reduces expression of CISH by at least about 40%. In several embodiments, gene editing reduces expression of CISH by at least about 50%. In several embodiments, gene editing reduces expression of CISH by at least about 60%. In several embodiments, gene editing reduces expression of CISH by at least about 70%. In several embodiments, gene editing reduces expression of CISH by at least about 80%. In several embodiments, gene editing reduces expression of CISH by at least about 90%.

[0255] In CD8+ T cells, CISH actively silences TCR signaling to maintain tumor tolerance, and CISH has been shown to be a downstream negative regulator of IL-15 receptor signaling (Palmer et al., J. Exp. Med. (2015) 212 (12): 2095-2113). In NK and T cells, CISH plays a role in checkpoint maturation and proliferation (Delconte et al., Nature Immunol (2016) 17: 816-24). Thus, according to several embodiments, gene editing CISH increases the cytotoxicity, persistence, immune avoidance or otherwise enhances the efficacy of engineered NK, T, or other cell as disclosed herein.

[0256] In several embodiments, the expression of CEACAM1 (encoded by CEACAM1) is reduced and/or eliminated in order to increase overall activation in resultant T cells and/or NK cells, or other cell type provided for herein. In several embodiments, CEACAM1 is disrupted and/or knocked out using one or more of the gene editing methods disclosed herein. In several embodiments, CEACAM1 is disrupted and/or knocked out using a Crispr-Cas mediated approach (e.g., Cas9) as disclosed elsewhere herein, with the Cas nuclease guided by the use of one more of the following CEACAM1-specific guide RNAs: SEQ ID NO: 497-499: SEQ ID NO 497-GACTGAGTTATTGGCGTGGC; SEQ ID NO 498-GAATGTTCCATTGATAAGCC; SEQ ID NO 499-GAGAGGCTGAGGTTTGCCCC.

[0257] In several embodiments, gene editing reduces transcription of CEACAM1 by about 30%, about 40%, about 50%, about 60%, about 70%, about 75%, about 80%, about 85%, about 90%, about 95%, about 97%, about 98%, about 99%, or more (including any amount between those listed). In several embodiments, gene editing reduces transcription of CEACAM1 by at least about 30%. In several embodiments, gene editing reduces transcription of CEACAM1 by at least about 40%. In several embodiments, gene editing reduces transcription of CEACAM1 by at least about 50%. In several embodiments, gene editing reduces transcription of CEACAM1 by at least about 60%. In several embodiments, gene editing reduces transcription of CEACAM1 by at least about 70%. In several embodiments, gene editing reduces transcription of CEACAM1 by at least about 80%. In several embodiments, gene editing reduces transcription of CEACAM1 by at least about 90%.

[0258] In several embodiments, gene editing can reduce expression of a target protein by about 30%, about 40%, about 50%, about 60%, about 70%, about 75%, about 80%, about 85%, about 90%, about 95%, about 97%, about 98%, about 99%, or more (including any amount between those listed). In several embodiments, gene editing reduces expression of CEACAM1 by about 30%, about 40%, about 50%, about 60%, about 70%, about 75%, about 80%, about 85%, about 90%, about 95%, about 97%, about 98%, about 99%, or more (including any amount between those listed). In several embodiments, gene editing reduces expression of CEACAM1 by at least about 30%. In several embodiments, gene editing reduces expression of CEACAM1 by at least about 40%. In several embodiments, gene editing reduces expression of CEACAM1 by at least about 50%. In several embodiments, gene editing reduces expression of CEACAM1 by at least about 60%. In several embodiments, gene editing reduces expression of CEACAM1 by at least about 70%. In several embodiments, gene editing reduces expression of CEACAM1 by at least about 80%. In several embodiments, gene editing reduces expression of CEACAM1 by at least about 90%.

[0259] CEACAM1 is an immune checkpoint for both NK and T cells and can inhibit lysis of CEACAM1-bearing tumor cell lines. Loss of expression of CEACAM1 can increase overall cytotoxicity for NK and T cells (Markel et al., J. Clin. Oncol. (2016) 34 (suppl. 15): 3044). Thus, according to several embodiments, gene editing CEACAM1 increases the cytotoxicity, persistence, immune avoidance or otherwise enhances the efficacy of engineered NK, T, or other cell as disclosed herein.

[0260] In several embodiments, the expression of DDIT4 (encoded by DDIT4) is reduced and/or eliminated in order to increase overall activation in resultant T cells and/or NK cells, or other cell type provided for herein. In several embodiments, DDIT4 is disrupted and/or knocked out using one or more of the gene editing methods disclosed herein. In several embodiments, DDIT4 is disrupted and/or knocked out using a Crispr-Cas mediated approach (e.g., Cas9) as disclosed elsewhere herein, with the Cas nuclease guided by the use of one more of the following DDIT4-specific guide RNAs: SEQ ID NO: 500-502: SEQ ID NO 500-CCTCACCATGCCTAGCCTTT; SEQ ID NO 501-CGATCTGGGGTGGGAGTTCG; SEQ ID NO 502-GTTTGACCGCTCCACGAGCC.

[0261] In several embodiments, gene editing reduces transcription of DDIT4 by about 30%, about 40%, about 50%, about 60%, about 70%, about 75%, about 80%, about 85%, about 90%, about 95%, about 97%, about 98%, about 99%, or more (including any amount between those listed). In several embodiments, gene editing reduces transcription of DDIT4 by at least about 30%. In several embodiments, gene editing reduces transcription of DDIT4 by at least about 40%. In several embodiments, gene editing reduces transcription of DDIT4 by at least about 50%. In several embodiments, gene editing reduces transcription of DDIT4 by at least about 60%. In several embodiments, gene editing reduces transcription of DDIT4 by at least about 70%. In several embodiments, gene editing reduces transcription of DDIT4 by at least about 80%. In several embodiments, gene editing reduces transcription of DDIT4 by at least about 90%.

[0262] In several embodiments, gene editing can reduce expression of a target protein by about 30%, about 40%, about 50%, about 60%, about 70%, about 75%, about 80%, about 85%, about 90%, about 95%, about 97%, about 98%, about 99%, or more (including any amount between those listed). In several embodiments, gene editing reduces expression of DDIT4 by about 30%, about 40%, about 50%, about 60%, about 70%, about 75%, about 80%, about 85%, about 90%, about 95%, about 97%, about 98%, about 99%, or more (including any amount between those listed). In several embodiments, gene editing reduces expression of DDIT4 by at least about 30%. In several embodiments, gene editing reduces expression of DDIT4 by at least about 40%. In several embodiments, gene editing reduces expression of DDIT4 by at least about 50%. In several embodiments, gene editing reduces expression of DDIT4 by at least about 60%. In several embodiments, gene editing reduces expression of DDIT4 by at least about 70%. In several embodiments, gene editing reduces expression of DDIT4 by at least about 80%. In several embodiments, gene editing reduces expression of DDIT4 by at least about 90%.

[0263] In NK and T cells, DDIT4 is a negative regulator of mTORC1, which itself enhances IL-15 mediated survival and proliferation of NK cells. Moreover, DDIT4 is upregulated by oxidative stress conditions as is common in tumor microenvironments. Loss of DDIT4 function in engineered cells may increase overall glucose metabolism leading to enhanced proliferation, as well as increasing overall NK or T cell cytotoxicity. Thus, according to several embodiments, gene editing DDIT4 increases the cytotoxicity, persistence, immune avoidance or otherwise enhances the efficacy of engineered NK, T, or other cell as disclosed herein.

[0264] In several embodiments, the expression of MAPKAP Kinase 3 (MAPKAPK3; encoded by MAPKAPK3) is reduced and/or eliminated in order to increase overall activation in resultant T cells and/or NK cells, or other cell type provided for herein. In several embodiments, MAPKAPK3 is disrupted and/or knocked out using one or more of the gene editing methods disclosed herein. In several embodiments, MAPKAPK3 is disrupted and/or knocked out using a Crispr-Cas mediated approach (e.g., Cas9) as disclosed elsewhere herein, with the Cas nuclease guided by the use of one more of the following MAPKAPK3-specific guide RNAs: SEQ ID NO: 494-496: SEQ ID NO 494-CTCTGCTGTTTCACCATCCA; SEQ ID NO 495-CCCGGCTTGGGCGGTGCTCC; SEQ ID NO 496-CGACTACCAGTTGTCCAAGC.

[0265] In several embodiments, gene editing reduces transcription of MAPKAPK3 by about 30%, about 40%, about 50%, about 60%, about 70%, about 75%, about 80%, about 85%, about 90%, about 95%, about 97%, about 98%, about 99%, or more (including any amount between those listed). In several embodiments, gene editing reduces transcription of MAPKAPK3 by at least about 30%. In several embodiments, gene editing reduces transcription of MAPKAPK3 by at least about 40%. In several embodiments, gene editing reduces transcription of MAPKAPK3 by at least about 50%. In several embodiments, gene editing reduces transcription of MAPKAPK3 by at least about 60%. In several embodiments, gene editing reduces transcription of MAPKAPK3 by at least about 70%. In several embodiments, gene editing reduces transcription of MAPKAPK3 by at least about 80%. In several embodiments, gene editing reduces transcription of MAPKAPK3 by at least about 90%.

[0266] In several embodiments, gene editing can reduce expression of a target protein by about 30%, about 40%, about 50%, about 60%, about 70%, about 75%, about 80%, about 85%, about 90%, about 95%, about 97%, about 98%, about 99%, or more (including any amount between those listed). In several embodiments, gene editing reduces expression of MAPKAPK3 by about 30%, about 40%, about 50%, about 60%, about 70%, about 75%, about 80%, about 85%, about 90%, about 95%, about 97%, about 98%, about 99%, or more (including any amount between those listed). In several embodiments, gene editing reduces expression of MAPKAPK3 by at least about 30%. In several embodiments, gene editing reduces expression of MAPKAPK3 by at least about 40%. In several embodiments, gene editing reduces expression of MAPKAPK3 by at least about 50%. In several embodiments, gene editing reduces expression of MAPKAPK3 by at least about 60%. In several embodiments, gene editing reduces expression of MAPKAPK3 by at least about 70%. In several embodiments, gene editing reduces expression of MAPKAPK3 by at least about 80%. In several embodiments, gene editing reduces expression of DDIT4 by at least about 90%.

[0267] MAPKAP Kinase 3 in expressed in both NK and T cells. Loss of MAPKAPK3 in engineered cells is expected to increase cytotoxicity, cytokine secretion, and overall NK signaling. Thus, according to several embodiments, gene editing MAPKAPK3 increases the cytotoxicity, persistence, immune avoidance or otherwise enhances the efficacy of engineered NK, T, or other cell as disclosed herein.

[0268] In several embodiments, the expression of SMAD3 (encoded by SMAD3) is reduced and/or eliminated in order to increase overall activation in resultant T cells and/or NK cells, or other cell type provided for herein. In several embodiments, SMAD3 is disrupted and/or knocked out using one or more of the gene editing methods disclosed herein. In several embodiments, SMAD3 is disrupted and/or knocked out using a Crispr-Cas mediated approach (e.g., Cas9) as disclosed elsewhere herein, with the Cas nuclease guided by the use of one more of the following SMAD3-specific guide RNAs: SEQ ID NO: 491-493: SEQ ID NO 491-CCGATCGTGAAGCGCCTGCT; SEQ ID NO 492-CGAGAAGGCGGTCAAGAGCC; SEQ ID NO 493-CTTGGTGTTGACGTTCTGCG.

[0269] In several embodiments, gene editing reduces transcription of SMAD3 by about 30%, about 40%, about 50%, about 60%, about 70%, about 75%, about 80%, about 85%, about 90%, about 95%, about 97%, about 98%, about 99%, or more (including any amount between those listed). In several embodiments, gene editing reduces transcription of SMAD3 by at least about 30%. In several embodiments, gene editing reduces transcription of SMAD3 by at least about 40%. In several embodiments, gene editing reduces transcription of SMAD3 by at least about 50%.

[0270] In several embodiments, gene editing reduces transcription of SMAD3 by at least about 60%. In several embodiments, gene editing reduces transcription of SMAD3 by at least about 70%. In several embodiments, gene editing reduces transcription of SMAD3 by at least about 80%. In several embodiments, gene editing reduces transcription of SMAD3 by at least about 90%.

[0271] In several embodiments, gene editing can reduce expression of a target protein by about 30%, about 40%, about 50%, about 60%, about 70%, about 75%, about 80%, about 85%, about 90%, about 95%, about 97%, about 98%, about 99%, or more (including any amount between those listed). In several embodiments, gene editing reduces expression of SMAD3 by about 30%, about 40%, about 50%, about 60%, about 70%, about 75%, about 80%, about 85%, about 90%, about 95%, about 97%, about 98%, about 99%, or more (including any amount between those listed). In several embodiments, gene editing reduces expression of SMAD3 by at least about 30%. In several embodiments, gene editing reduces expression of SMAD3 by at least about 40%. In several embodiments, gene editing reduces expression of SMAD3 by at least about 50%. In several embodiments, gene editing reduces expression of SMAD3 by at least about 60%. In several embodiments, gene editing reduces expression of SMAD3 by at least about 70%. In several embodiments, gene editing reduces expression of SMAD3 by at least about 80%. In several embodiments, gene editing reduces expression of SMAD3 by at least about 90%.

[0272] SMAD3 is a downstream mediator of TGF-Beta and Activin A signaling. Inhibition of activin A provides an effective downstream TGFBR knockout. Smad3 silenced NK cells demonstrate increased proliferation and differentiation, as well as increased cytotoxicity in engineered T and NK cells (Tang et al., Nat. Commun. (2017) 8: 14677). Thus, according to several embodiments, gene editing SMAD3 increases the cytotoxicity, persistence, immune avoidance or otherwise enhances the efficacy of engineered NK, T, or other cell as disclosed herein.

### Viral Immunosuppressive Peptides

[0273] Many viral infections occur, at least in part, due to the ability of a virus to evade an host immune system, either by camouflage or suppression of host immune reactivity. In vitro studies have shown that particular aspects of certain viruses have such immunosuppressive effects, for example, retroviral transmembrane envelope proteins, such as the p15E protein. Additionally, studies have identified conserved regions of sequences across multiple viral types, see for example Table 7, which includes, among others, a 17 amino acid conserved sequence, CKS-17 (SEQ ID NO: 199), and the nucleic acid encoding the same (SEQ ID NO: 216).

TABLE 7
Viral Peptides

| SEQ ID | | |
|---|---|---|
| NO: | Name | Sequence |
| 199 | CKS-17 | LQNRRGLDLLFLKEGGL |
| 200 | MoLV p15E | LQNRRGLDLLFLKEGGLCAALKEECCF |
| 201 | FLC p15E | LQNRRGLDLLFLKEGGLCAALKEECCF |
| 202 | AKV p15E | LQNRRGLDLLFLKEGGLCAALKEECCF |
| 203 | GLV p15E | LQNRRGLDLLFLKEGGLCAALKEECCF |
| 204 | MMCF p15E | LQNRRGLDLLFLKEGGLCAALKEECCF |
| 205 | AMCF p15E | LQNRRGLDLLFLKEGGLCAALKEECCF |
| 206 | FeLV p15E | LQNRRGLDLLFLQEGGLCAALKEECCF |
| 207 | MPMV gp20 | LQNRRGLDLLTAEQGGICLALQEKCCF |
| 208 | REV-A GP20 | LQNRRGLDLLTAEQGGICLALQEKCCF |
| 209 | HTLV-I gp21 | AQNRRGLDLLFWEQGGLCKALQEQCRF |
| 210 | HTLV-II gp21 | AQNRRGLDLLFWEQGGLCKAIQEQCCF |
| 211 | HIV-1 NEF | MTYKAAVDLSHFLKEKGGL |
| 212 | HIV-1 gp41 | LQARVLAVERYLKDQQL |
| 213 | B26 | LQNKRGLDLLFLX₁X₂GGL |
| | | (X₁ = K/E, X₂ = E/K) |
| 214 | BaEV | LQNRRGLDLLTAEQGGX₁ |
| | | (X₁ = L/I) |
| 215 | ERV-9, 4-1 | X₁QNRX₂X₃LX₄X₅X₆X₇AX₈X₉X₁₀GX₁₁ |
| | | (X₁ = L/Y, X₂ = */L, X₃ = G/A, X₄ = D/N, X₅ = L/Y, X₆ = L/S, |
| | | X₇ = L/T, X₈ = E/Q/A, X₉ = E/K, X₁₀ = G/E, X₁₁ = L/V |
| 216 | CKS-17 | ctgcaaaacagaaggggattagacctgctttttcttaaagagggagggctc |
| 1019 | HIV-1 NEF | TYKAAVDLSHFLKEKGGL |

[0274] In several embodiments, one or more of such viral immunosuppressive peptides (also referred to as viral peptides) are used to confer resistance to inactivation of engineered immune cells by host NK cells. Various approaches can be undertaken depending on the embodiment and the cell type to be used.

[0275] As discussed herein, various immunosuppressive constructs are provided for in order to confer on, for example an NK or a T cell in a mixed NK and T cell therapeutic population, reduced immunogenicity vis-à-vis the other therapeutic cells, as well as vis-à-vis host T cells. In several embodiments, the immunosuppressive constructs and resulting engineered (and/or edited) cells are less susceptible to fratricide from another member of the therapeutic cell population, and also reduce risk of graft versus host and host versus graft side effects. FIGS. 15A and 15B show non-limiting schematics of how an immunosuppressive construct according to embodiments provided for herein might be constructed. Table 8 shows the corresponding SEQ ID NOS for certain non-limiting immunosuppressive constructs provided for herein.

TABLE 8
Selected Immunosuppressive Constructs Sequence Identifiers

| | | SEQ | |
|---|---|---|---|
| SEQ ID | | ID | |
| NO | Construct Identifier | NO | Construct Identifier |
| 683 | UL18 trimer_SS VMAPRTLFL_IRES_GFP | 791 | GP41fptm_sfGFP_aa |
| 684 | UL18 trimer_SS VMAPRTLFL_IRES_GFP | 792 | GP41fptm_sfGFP |
| 685 | UL18 trimer_SS VMAPRTLFL-AA [no Flag or | 793 | GP41fptm_aa_No-GFP |
| | GFP] | | |
| 686 | UL18 trimer_SS VMAPRTLFL-NT [no Flag or | 794 | GP41fptm_NT_No_GFP |
| | GFP] | | |
| 687 | HLA-E trimer_SS VMAPRTLFL_IRES_GFP | 795 | CKS17-8aTM_sfGFP_aa |
| 688 | HLA-E trimer_SS VMAPRTLFL | 796 | CKS17-8aTM_sfGFP |
| 689 | HLA-E trimer_SS VMAPRTLFL-AA-[no flag or | 797 | CKS17-8aTM_aa_No_GFP |
| | gfp] | | |
| 690 | HLA-E trimer_SS VMAPRTLFL [no flag or gfp] | 798 | CKS17-8aTM_NT_No_GFP |
| 691 | CKS17-8aHTM_aa | 799 | CKS_HTLV-8aTM_sfGFP_aa |
| 692 | CKS17-8aHTM | 800 | CKS_HTLV-8aTM_NT_No_GFP |
| 693 | CKS17-8aHTM_aa [no flag or gfp] | 801 | CKS_HTLV-8aTM_aa_No_GFP |
| 694 | CKS17-8aHTM [no flag or gfp] | 802 | CKS_HTLV-8aTM_sfGFP |
| 695 | p15E-L-8aHTM_IRES_GFP | 803 | CKS_LMP-8aTM_sfGFP_aa |
| 696 | p15E-L-8aHTM_IRES_GFP | 804 | CKS_LMP-8aTM_sfGFP |
| 697 | p15E-L-8aHTM [no flag/gfp] | 805 | CKS_LMP-8aTM_aa_no_GFP |
| 698 | p15E-L-8aHTM_[no flag/gfp] | 806 | CKS_LMP-8aTM_NT_No_GFP |
| 699 | HTLV-8aHTM_IRES_GFP | 807 | CKS_GP41fptm_sfGFP_aa |
| 700 | HTLV-8aHTM_IRES_GFP | 808 | CKS_GP41fptm_sfGFP |
| 701 | HTLV-8aHTM_[no flag/gfp] | 809 | CKS_GP41fptm_aa_No_GFP |
| 702 | HTLV-8aHTM_[no flag/gfp] | 810 | CKS_GP41fptm_NT_No_GFP |
| 703 | HIV_L-8aHTM_IRES_GFP | 811 | LMP_S-CD8HTM_sfGFP_aa |
| 704 | HIV_L-8aHTM_IRES_GFP | 812 | LMP_S-CD8HTM_sfGFP |
| 705 | HIV_L-8aHTM_[no flag/gfp] | 813 | LMP_S-CD8HTM_aa_No_GFP |
| 706 | HIV_L-8aHTM_[no flag/gfp] | 814 | LMP_S-CD8HTM_NT_No_GFP |
| 707 | HIV_S-8aHTM_IRES_GFP | 815 | LMP_CD47tm162_sfGFP_aa |
| 708 | HIV_S-8aHTM_IRES_GFP | 816 | LMP_CD47tm162_sfGFP |
| 709 | HIV_S-8aHTM_no flag/gfp | 817 | LMP_CD47tm162_aa_No_GFP |
| 710 | HIV_S-8aHTM_no flag/gfp | 818 | LMP_CD47tm162_NT_No_GFP |
| 711 | TCR Synthetic 3x-8aHTM_IRES_GFP | 819 | p15E_CD47tm162_sfGFP_aa |
| 712 | TCR Synthetic 3x-8aHTM_IRES_GFP | 820 | p15E_CD47tm162_sfGFP |
| 713 | TCR Synthetic 3x-8aHTM_no flag/gfp | 821 | p15E_CD47tm162_aa_No_GFP |
| 714 | TCR Synthetic 3x-8aHTM_no flag/gfp | 823 | CD47_GP41fptm_sfGFP_aa |
| 715 | tCD47-8aHTM_IRES_GFP | 824 | CD47_GP41fptm_sfGFP |
| 716 | tCD47-8aHTM_IRES_GFP | 825 | CD47_GP41fptm_aa_No_GFP |
| 717 | tCD47-8aHTM_no flag/gfp | 826 | CD47_GP41fptm_NT_No_GFP |
| 718 | tCD47-8aHTM_no flag/gfp | 827 | HLA-E_STE20_sfGFP_aa |
| 719 | p15Ex3-8aHTM_IRES_GFP | 828 | HLA-E_STE20_sfGFP |
| 720 | p15Ex3-8aHTM_IRES_GFP | 829 | HLA-E_STE20_aa_NO_GFP |
| | | | (a.k.a. HLA-E (PBL20) |
| 721 | p15Ex3-8aHTM_no flag/gfp | 830 | HLA-E_STE20_NT_NO_GFP |
| | | | (a.k.a. HLA-E (PBL20) |
| 722 | p15Ex3-8aHTM_no flag/gfp | 831 | anti-SIRPa |
| | | | agonist_vHL_sfGFP_aa |
| 723 | p15E_tCD47-8aHTM_IRES_GFP | 832 | anti-SIRPa agonist_vHL_sfGFP |
| 724 | p15E_tCD47-8aHTM_IRES_GFP | 833 | anti-SIRPa |
| | | | agonist_vHL_aa_NO_GFP |
| 725 | p15E_tCD47-8aHTM_no flag/gfp | 834 | anti-SIRPa |
| | | | agonist_vHL_NT_NO_GFP |
| 726 | p15E_tCD47-8aHTM_no flag/gfp | 835 | HTLV1_fGP62_sfGFP_aa |
| 727 | tCD47_p15E-8aHTM_IRES_GFP | 836 | HTLV1_fGP62_sfGFP |
| 728 | tCD47_p15E-8aHTM_IRES_GFP | 837 | HTLV1_fGP62_aa_NO_GFP |
| 729 | tCD47_p15E-8aHTM_no flag gfp | 838 | HTLV1_fGP62_NO_GFP |
| 730 | tCD47_p15E-8aHTM_no flag/gfp | 839 | HTLV1_GP21_sfGFP_aa |
| 731 | HIV_L_tCD47-8aHTM_IRES_GFP | 840 | HTLV1_GP21_sfGFP |
| 732 | HIV_L_tCD47-8aHTM_IRES_GFP | 841 | HTLV1_GP21_aa_NO_GFP |
| 733 | HIV_L_tCD47-8aHTM_no flag/gfp | 842 | HTLV1_GP21_NO_GFP |
| 734 | HIV_L_tCD47-8aHTM_no flag/gfp | 843 | LASV_fGP2_sfGFP_aa |
| 735 | HIV_S_tCD47-8aHTM_IRES_GFP | 844 | LASV_fGP2_sfGFP |
| 736 | HIV_S_tCD47-8aHTM_IRES_GFP | 845 | LASV_fGP2_aa_NO_GFP- |
| 737 | HIV_S_tCD47-8aHTM_no flag/gfp | 846 | LASV_fGP2_NT_NO_GFP |
| 738 | HIV_S_tCD47-8aHTM_no flag/gfp | 847 | SEBOV_fGP_sfGFP_aa |
| 739 | HTLV_tCD47-8aHTM_IRES_GFP | 848 | SEBOV_fGP_sfGFP |
| 740 | HTLV_tCD47-8aHTM_IRES_GFP | 849 | SEBOV_fGP_aa_NO_GFP |
| 741 | HTLV_tCD47-8aHTM_no flag/gfp | 850 | SEBOV_fGP_NT_NO_GFP |
| 742 | HTLV_tCD47-8aHTM_no flag/gfp | 851 | SEBOV_GP2_sfGFP_aa |
| 743 | tCD47_p15Ex2-8aHTM_IRES_GFP | 852 | SEBOV_GP2_sfGFP |
| 744 | tCD47_p15Ex2-8aHTM_IRES_GFP | 853 | SEBOV_GP2_aa_NO_GFP |
| 745 | tCD47_p15Ex2-8aHTM_noflag/gfp | 854 | SEBOV_GP2_NT_NO_GFP |
| 746 | tCD47_p15Ex2-8aHTM_no flag/gfp | 855 | SCoV_S2_sfGFP_aa |
| 747 | CKS17-8aHTM_eGFP_aa | 856 | SCoV_S2_sfGFP |
| 748 | CKS17-8aHTM_eGFP | 857 | SCoV_S2_aa_NO_GFP |
| 749 | CKS17-8aHTM_aa_noGFP | 858 | SCOV_S2_NT_NO_GFP |
| 750 | CKS17-8aHTM_NT_no GFP | 859 | LGALS3BP_sfGFP_aa |
| 751 | CD47-eGFP_aa | 860 | LGALS3BP_sfGFP |
| 752 | CD47-eGFP | 861 | LGALS3BP_aa_NO_GFP |
| 753 | CD47-_aa_no_GGFP | 862 | LGALS3BP_NT_No_GFP |
| 754 | CD47-NT_no_GFP | 863 | CD24_sfGFP_aa |
| 755 | fGP41_HIVtm_sfGFP_aa | 864 | CD24_sfGFP |
| 756 | fGP41_HIVtm_sfGFP | 865 | CD24_aa_NO_GFP |
| 757 | fGP41_HIVtm_aa_no_GFP | 866 | CD24_NT_NO_GFP |
| 758 | fGP41_HIVtm_NT_no_GFP | 867 | HCV_E2_sfGFP_aa |
| 759 | p15Etm_sfGFP_aa | 868 | HCV_E2_sfGFP |
| 760 | p15Etm_sfGFP | 869 | HCV_E2_aa_NO_GFP |
| 761 | p15Etm_aa_no_GFP | 870 | HCV_E2_NT_NO_GFP |
| 762 | p15Etm_NT_noGFP | 871 | anti-SIRPa |
| | | | agonist_vLH_sfGFP_aa |
| 763 | CD43_TM_sfGFP_aa | 872 | anti-SIRPa agonist_vLH_sfGFP |
| 764 | CD43_TM_sfGFP | 873 | anti-SIRPa |
| | | | agonist_vLH_aa_NO_GFP |
| 765 | CD43_TM_aa_No_GFP | 874 | anti-SIRPa |
| | | | agonist_vLH_NT_NO_GFP |
| 766 | CD43_TM_NT_no_GFP | 875 | CEACAM1_sfGFP_aa |
| 767 | LMP1_TM-sfGFP_aa | 876 | CEACAM1_sfGFP |
| 768 | LMP1_TM-sfGFP | 877 | CEACAMI_aa_NO_GFP |
| 769 | LMP1_TM_aa_no_GFP | 878 | CEACAM1_NT_NO_GFP |
| 770 | LMP1_TM-NT_No-GFP | 879 | CD155tm_3M_sfGFP_aa |
| 771 | fgD_TM_sfGFP_aa | 880 | CD155tm_3M_sfGFP |
| 772 | fgD_TM_sfGFP | 881 | CD155tm_3M_aa_NO_GFP |
| 773 | fgD_TM_AA-NO_GFP | 882 | CD155tm_3M_NT_NO_GFP |
| 774 | fgD_TM_NT_NO_GFP | 883 | CD31tm_sfGFP_aa |
| 775 | fLLT1_TM-sfGFP_aa | 884 | CD31tm_sfGFP |
| 776 | fLLT1_TM-sfGFP | 885 | CD31tm_aa_NO_GFP |
| 777 | fLLT1_TM-_aa_No_GFP | 886 | CD31tm_NT_NO_GFP |
| 778 | fLLT1_TM-NT_No_GFP | 887 | CD111tm_sfGFP_aa |
| 779 | CD47tm162_sfGFP_aa | 888 | CD111tm_sfGFP |
| 780 | CD47tm162_sfGFP | 889 | CD111tm_aa_NO_GFP |
| 781 | CD47tm162_aa_No_GFP | 890 | CD111tm_NT_NO_GFP |
| 782 | CD47tm162_NT_NoGFP | 891 | CD200tm_sfGFP_aa |
| 783 | LMP_L-CD8HTM_sfGFP_aa | 892 | CD200tm_sfGFP |
| 784 | LMP_L-CD8HTM_sfGFP | 893 | CD200tm_aa_NO_GFP |
| 785 | LMP_L-CD8HTM_aa_No_GFP | 894 | CD200tm_NO_GFP |
| 786 | LMP_L-CD8HTM_NT_No_GFP | 895 | CD8a signal peptide AA |
| 787 | LALLFWLx5-CD8HTM_sfGFP_aa | 896 | CD8a signal peptide NT |
| 788 | LALLFWLx5-CD8HTM_sfGFP | 997 | HLA-E_(PBL20)_(E1-5 sgRNA |
| | | | resistant)_AA |
| 789 | LALLFWLx5-CD8HTM_aa_no_GFP | 998 | HLA-E_(PBL20)_(E1-5 sgRNA |
| | | | resistant)_DNA |
| 790 | LALLFWLx5-CD8HTM_NT_No_GFP | 999 | HLA-E_(PBL15)_AA |
| 822 | p15E_CD47tm162_NT_No_GFP | 1000 | HLA-E_(PBL15)_DNA |
| 1020 | UL18 trimer_SS VMAPRTLFL-AA [no Flag or | 1017 | HLA-E trimer_SS VMAPRTLFL- |
| | GFP] | | AA-[no flag or gfp] |
| 1021 | HLA-E_STE20_sfGFP_aa | 1014 | HLA-E_STE20_aa_NO_GFP |
| | | | (a.k.a. HLA-E (PBL20) |
| 1022 | CD24_sfGFP_aa | 1023 | CD24_aa_NO_GFP |
| 1015 | HLA-E_(PBL20)_(E1-5 sgRNA resistant)_AA | 1016 | HLA-E_(PBL15)_AA |

[0276] It is contemplated that any of the amino acid sequences provided herein may be provided with or without a signal sequence (e.g., a CD8a signal sequence, such as MALPVTALLLPLALLLHAARP). It is also contemplated that any of the amino acid sequences provided herein may be provided with or without an initial methionine (M) residue.

[0277] In some embodiments, one or more viral immunosuppressive peptides are integrated into a chimeric antigen receptor. According to several embodiments, the one or more viral immunosuppressive peptides are integrated into a chimeric antigen receptor that is then expressed by a population of immune cells to be used in treating a patient. In several embodiments, the immune cells are allogeneic to the patient. In some embodiments, the immune cells comprise NK cells. In some embodiments, the immune cells comprise T cells. In some embodiments, the immune cells comprise NK cells and T cells. In several embodiments, a combination of NK cells and T are engineered to express one or more CARs that comprise one or more viral immunosuppressive peptide. FIG. 9A depicts a non-limiting embodiment of a viral immunosuppressive peptide that is incorporated into a CAR (identified generically as “Immunosuppressive effector Domain”, which shall be understood to refer to any of the viral immunosuppressive peptides or other immunosuppressive peptides/proteins disclosed herein, unless otherwise specified). Shown in FIG. 9A, the viral immunosuppressive peptide is integrated into the hinge/spacer domain of a CAR comprising a target binder (such as an scFv), a hinge (also referred to herein as a spacer), a transmembrane domain and one or more intracellular signaling domains. Depending on the embodiment, more than one (e.g., two, three, four, five, or more) viral immunosuppressive peptides can be introduced into the hinge/spacer region of the CAR. In several such embodiments, as schematically depicted in FIG. 9B, when two (or more) viral immunosuppressive peptides are used, they can be of a different sequence or type. For example, in several embodiments, a CKS-17 peptide is integrated into the hinge region of the CAR in conjunction with, for example, a REV-A peptide. In several embodiments, the inclusion of two or more viral immunosuppressive peptides creates a synergistic immunosuppressive effect.

[0278] Depending on the embodiment, the length of the hinge/spacer region can be altered. In several embodiments, a CD8alpha hinge/spacer region is use, but, in some embodiments, a longer or a shorter spacer is used. The spacer can be, depending on the embodiment, an IgG1, IgG2, IgG3, IgG4, or CD28 spacer domain or be derived from IgG1, IgG2, IgG3, IgG4, CD28, or can be a fully synthetic sequence. In several embodiments, IgG-based spacers are edited to reduce or eliminate the ability of the spacer to bring Fc-receptor bearing cells, which can advantageously reduce off-target activation of immune cells (such as those bearing the immunosuppressive effectors as disclosed herein). Non-limiting editing approaches include, but are not limited to, deletion of the heavy chain constant 2 (CH2) domain to abrogate binding to the Fc receptor, or mutating certain amino acids that are essential to Fc receptor binding. In several embodiments, a longer spacer advantageously allows for enhances targeting of certain membrane-proximal epitopes expressed by cancer cells and exposure of the immunosuppressive effector such that it can interact with host and/or administered immune cells to reduce unwanted suppression of the therapeutic cells. In several embodiments, a single hinge region can be made longer by including multiple hinge-encoding sequences, e.g., two, three, four, or more hinges. In several embodiments, wherein multiple hinge regions are used, they can be of the same type (e.g., three CD8a hinges) or can vary (e.g., one CD8a hinge, one CD28 hinge, and a IgG1 hinge). In several embodiments, a shorter hinge is used, wherein the shorter hinge limits the ability of host phosphatases (like CD45) to attenuate signaling of a CAR expressed by the engineered immune cell. In several embodiments, the hinge region comprises one or more of SEQ ID NOs: 479-487. In some embodiments, the hinge region comprises an amino acid sequence with at least about 80%, at least about 85%, at least about 90%, at least about 94%, at least about 95%, at least about 96%, at least about 97%, at least about 98%, or at least about 99%, sequence identity, homology and/or functional equivalence with any of SEQ ID NOs: 479-487: SEQ ID NO 479-EPKSCDKTHTCPPCP; SEQ ID NO 480-ERKCCVECPPCP; SEQ ID NO 481-ELKTPLGDTHTCPRCPEPKSCDTPPPCPRCPEPKSCDTPPPCPRCPEKSCDTPPPCPRCP; SEQ ID NO 482-ESKYGPPCPSCP; SEQ ID NO 483-ESKYGPPCPPCP; SEQ ID NO 484-YGPPCPPCP; SEQ ID NO 485-KYGPPCPPCP; SEQ ID NO 486-EVVKYGPPCPPCP; SEQ ID NO 487-IEVMYPPPYLDNEKSNGTIIHVKGKHLCPSPLFPGPSKP.

[0279] FIG. 9C depicts an additional approach according to several embodiments disclosed herein, namely the engineering of the viral immunosuppressive peptide into the linker between the heavy chain and the light chain of an scFv. in additional embodiments, where a target binder that is not an scFv (e.g., a full antibody), the viral immunosuppressive peptide can be integrated into any region of that binder that allows for exposure of the vial immunosuppressive peptide as well as maintenance of target binding capability. As with integration into the hinge region, engineering the viral immunosuppressive peptide into the linker region can be done with a single peptide, or with multiple peptides. An additional approach is shown in FIG. 9D, with the viral immunosuppressive peptide engineered into the N-terminal region of the chimeric antigen receptor. As with the other approaches, in several embodiments multiple viral immunosuppressive peptides can be used. Additionally, combinations of these positions within the CAR can be used. For example, a viral immunosuppressive peptide (or more than one) can be positioned in the hinge region in combination with, for example a viral immunosuppressive peptide (or more than one) positioned in the linker region of an scFv and/or at the N-terminus of the CAR. In several embodiments, the positions allow the viral immunosuppressive peptides to be exposed such that they can interact with, and thus suppress, host immune cell activity that would otherwise reduce the efficacy of the engineered immune cell expressing the CAR.

[0280] In several embodiments, the engineered CAR comprises one or more copies of one or more of the following amino acid or DNA sequences: SEQ ID NO: 199-216, 1019, 220-221, 225-226, 230-231, 235-236, 240-241, 245-246, 250-251, 273-274, 278, 280, 288, or 289. As discussed above, those sequences (or individual sequence) can be positioned in the hinge region, the N-terminal region or within the target binder region (e.g., within the linker of an scFv). In several embodiments, the CAR comprises an amino acid sequence or DNA sequence with at least about 80%, at least about 85%, at least about 90%, at least about 94%, at least about 95%, at least about 96%, at least about 97%, at least about 98%, or at least about 99%, sequence identity, homology and/or functional equivalence with any of SEQ ID NOs: SEQ ID NO: 199-216, 1019, 220-221, 225-226, 230-231, 235-236, 240-241, 245-246, 250-251, 273-274, 278, 280, 288, or 289.

[0281] In several embodiments, the engineered cells provided for herein comprise a chimeric receptor that targets NKG2D ligands, wherein the CAR comprises an amino acid of SEQ ID NO: 174, or comprises an amino acid sequence with at least about 80%, at least about 85%, at least about 90%, at least about 94%, at least about 95%, at least about 96%, at least about 97%, at least about 98%, or at least about 99%, sequence identity, homology and/or functional equivalence to SEQ ID NO: 174 with one or more copies of one or more of the following viral immunosuppressive amino acid sequences: SEQ ID NO: 199-216, 220, 225, 230, 235, 240, 245, 250, 273, 280, 288, or 289 integrated into the sequence of SEQ ID NO: 174. In addition to, or in place of the integrated viral immunosuppressive amino acids, the CAR optionally comprises an amino acid of SEQ ID NO: 174, or comprises an amino acid sequence with at least about 80%, at least about 85%, at least about 90%, at least about 94%, at least about 95%, at least about 96%, at least about 97%, at least about 98%, or at least about 99%, sequence identity, homology and/or functional equivalence to SEQ ID NO: 174, with one or more of the viral immunosuppressive sequences expressed on the cell in a membrane-bound format, as discussed below.

[0282] In several embodiments, the engineered cells provided for herein comprise a chimeric receptor that targets NKG2D ligands, wherein the CAR comprises an amino acid of SEQ ID NO: 1024, or comprises an amino acid sequence with at least about 80%, at least about 85%, at least about 90%, at least about 94%, at least about 95%, at least about 96%, at least about 97%, at least about 98%, or at least about 99%, sequence identity, homology and/or functional equivalence to SEQ ID NO: 1024 with one or more copies of one or more of the following viral immunosuppressive amino acid sequences: SEQ ID NO: 199-216, 220, 225, 230, 235, 240, 245, 250, 273, 280, 288, or 289 integrated into the sequence of SEQ ID NO: 1024. In addition to, or in place of the integrated viral immunosuppressive amino acids, the CAR optionally comprises an amino acid of SEQ ID NO: 1024, or comprises an amino acid sequence with at least about 80%, at least about 85%, at least about 90%, at least about 94%, at least about 95%, at least about 96%, at least about 97%, at least about 98%, or at least about 99%, sequence identity, homology and/or functional equivalence to SEQ ID NO: 1024, with one or more of the viral immunosuppressive sequences expressed on the cell in a membrane-bound format, as discussed below.

[0283] In several embodiments, the engineered cells provided for herein comprise a chimeric receptor that targets NKG2D ligands, wherein the CAR comprises an amino acid of SEQ ID NO: 899, or comprises an amino acid sequence with at least about 80%, at least about 85%, at least about 90%, at least about 94%, at least about 95%, at least about 96%, at least about 97%, at least about 98%, or at least about 99%, sequence identity, homology and/or functional equivalence to SEQ ID NO: 899 with one or more copies of one or more of the following viral immunosuppressive amino acid sequences: SEQ ID NO: 199-216, 220, 225, 230, 235, 240, 245, 250, 273, 280, 288, or 289 integrated into the sequence of SEQ ID NO: 899. In addition to, or in place of the integrated viral immunosuppressive amino acids, the CAR optionally comprises an amino acid of SEQ ID NO: 899, or comprises an amino acid sequence with at least about 80%, at least about 85%, at least about 90%, at least about 94%, at least about 95%, at least about 96%, at least about 97%, at least about 98%, or at least about 99%, sequence identity, homology and/or functional equivalence to SEQ ID NO: 899, with one or more of the viral immunosuppressive sequences expressed on the cell in a membrane-bound format, as discussed below.

[0284] In several embodiments, the engineered cells provided for herein comprise a chimeric receptor that targets NKG2D ligands, wherein the CAR comprises an amino acid of SEQ ID NO: 1025, or comprises an amino acid sequence with at least about 80%, at least about 85%, at least about 90%, at least about 94%, at least about 95%, at least about 96%, at least about 97%, at least about 98%, or at least about 99%, sequence identity, homology and/or functional equivalence to SEQ ID NO: 1025 with one or more copies of one or more of the following viral immunosuppressive amino acid sequences: SEQ ID NO: 199-216, 220, 225, 230, 235, 240, 245, 250, 273, 280, 288, or 289 integrated into the sequence of SEQ ID NO: 1025. In addition to, or in place of the integrated viral immunosuppressive amino acids, the CAR optionally comprises an amino acid of SEQ ID NO: 1025, or comprises an amino acid sequence with at least about 80%, at least about 85%, at least about 90%, at least about 94%, at least about 95%, at least about 96%, at least about 97%, at least about 98%, or at least about 99%, sequence identity, homology and/or functional equivalence to SEQ ID NO: 1025, with one or more of the viral immunosuppressive sequences expressed on the cell in a membrane-bound format, as discussed below.

[0285] In several embodiments, the engineered cells provided for herein comprise a CAR that targets CD19, wherein the CAR comprises an amino acid of SEQ ID NO: 178, or comprises an amino acid sequence with at least about 80%, at least about 85%, at least about 90%, at least about 94%, at least about 95%, at least about 96%, at least about 97%, at least about 98%, or at least about 99%, sequence identity, homology and/or functional equivalence to SEQ ID NO: 178 with one or more copies of one or more of the following viral immunosuppressive amino acid sequences: SEQ ID NO: 199-216, 220, 225, 230, 235, 240, 245, 250, 273, 280, 288, or 289 integrated into the sequence of SEQ ID NO: 178. In addition to, or in place of the integrated viral immunosuppressive amino acid, the CAR optionally comprises an amino acid of SEQ ID NO: 178, or comprises an amino acid sequence with at least about 80%, at least about 85%, at least about 90%, at least about 94%, at least about 95%, at least about 96%, at least about 97%, at least about 98%, or at least about 99%, sequence identity, homology and/or functional equivalence to SEQ ID NO: 178, with one or more of the viral immunosuppressive sequences expressed on the cell in a membrane-bound format, as discussed below.

[0286] In several embodiments, the engineered cells provided for herein comprise a CAR that targets CD19, wherein the CAR comprises an amino acid of SEQ ID NO: 1026, or comprises an amino acid sequence with at least about 80%, at least about 85%, at least about 90%, at least about 94%, at least about 95%, at least about 96%, at least about 97%, at least about 98%, or at least about 99%, sequence identity, homology and/or functional equivalence to SEQ ID NO: 1026 with one or more copies of one or more of the following viral immunosuppressive amino acid sequences: SEQ ID NO: 199-216, 220, 225, 230, 235, 240, 245, 250, 273, 280, 288, or 289 integrated into the sequence of SEQ ID NO: 1026. In addition to, or in place of the integrated viral immunosuppressive amino acid, the CAR optionally comprises an amino acid of SEQ ID NO: 1026, or comprises an amino acid sequence with at least about 80%, at least about 85%, at least about 90%, at least about 94%, at least about 95%, at least about 96%, at least about 97%, at least about 98%, or at least about 99%, sequence identity, homology and/or functional equivalence to SEQ ID NO: 1026, with one or more of the viral immunosuppressive sequences expressed on the cell in a membrane-bound format, as discussed below.

[0287] In several embodiments, the engineered cells provided for herein comprise a CAR that targets CD19, wherein the CAR comprises an amino acid of SEQ ID NO: 901, or comprises an amino acid sequence with at least about 80%, at least about 85%, at least about 90%, at least about 94%, at least about 95%, at least about 96%, at least about 97%, at least about 98%, or at least about 99%, sequence identity, homology and/or functional equivalence to SEQ ID NO: 901 with one or more copies of one or more of the following viral immunosuppressive amino acid sequences: SEQ ID NO: 199-216, 220, 225, 230, 235, 240, 245, 250, 273, 280, 288, or 289 integrated into the sequence of SEQ ID NO: 901. In addition to, or in place of the integrated viral immunosuppressive amino acid, the CAR optionally comprises an amino acid of SEQ ID NO: 901, or comprises an amino acid sequence with at least about 80%, at least about 85%, at least about 90%, at least about 94%, at least about 95%, at least about 96%, at least about 97%, at least about 98%, or at least about 99%, sequence identity, homology and/or functional equivalence to SEQ ID NO: 901, with one or more of the viral immunosuppressive sequences expressed on the cell in a membrane-bound format, as discussed below.

[0288] In several embodiments, the engineered cells provided for herein comprise a CAR that targets CD19, wherein the CAR comprises an amino acid of SEQ ID NO: 1027, or comprises an amino acid sequence with at least about 80%, at least about 85%, at least about 90%, at least about 94%, at least about 95%, at least about 96%, at least about 97%, at least about 98%, or at least about 99%, sequence identity, homology and/or functional equivalence to SEQ ID NO: 1027 with one or more copies of one or more of the following viral immunosuppressive amino acid sequences: SEQ ID NO: 199-216, 220, 225, 230, 235, 240, 245, 250, 273, 280, 288, or 289 integrated into the sequence of SEQ ID NO: $$$. In addition to, or in place of the integrated viral immunosuppressive amino acid, the CAR optionally comprises an amino acid of SEQ ID NO: 1027, or comprises an amino acid sequence with at least about 80%, at least about 85%, at least about 90%, at least about 94%, at least about 95%, at least about 96%, at least about 97%, at least about 98%, or at least about 99%, sequence identity, homology and/or functional equivalence to SEQ ID NO: 1027, with one or more of the viral immunosuppressive sequences expressed on the cell in a membrane-bound format, as discussed below.

[0289] In several embodiments, the engineered cells provided for herein comprise a CAR that targets CD19, wherein the CAR is encoded by a nucleic acid sequence comprising SEQ ID NO: 466, or comprises an nucleic acid sequence with at least about 80%, at least about 85%, at least about 90%, at least about 94%, at least about 95%, at least about 96%, at least about 97%, at least about 98%, or at least about 99%, sequence identity, homology and/or functional equivalence to SEQ ID NO: 466 with one or more copies of one or more of the following viral immunosuppressive amino acid sequences: SEQ ID NO: 199-216, 220, 225, 230, 235, 240, 245, 250, 273, 280, 288, or 289 integrated into the sequence encoded by SEQ ID NO: 466. In addition to, or in place of the integrated viral immunosuppressive amino acids, the CAR optionally comprises a CAR encoded by SEQ ID NO: 466, or comprises an amino acid sequence with at least about 80%, at least about 85%, at least about 90%, at least about 94%, at least about 95%, at least about 96%, at least about 97%, at least about 98%, or at least about 99%, sequence identity, homology and/or functional equivalence to the sequence encoded by SEQ ID NO: 466, with one or more of the viral immunosuppressive sequences expressed on the cell in a membrane-bound format, as discussed below.

[0290] In several embodiments, the engineered cells provided for herein comprise a CAR that targets CD70. In several embodiments, the CAR comprises the amino acid sequence set forth in any of SEQ ID NOs: 383-465 and 912-994. In several embodiments, the engineered cells provided for herein comprise a CAR that targets CD70, wherein the CAR comprises an amino acid of any of SEQ ID NOs: 383-465 or 912-994, or comprises an amino acid sequence with at least about 80%, at least about 85%, at least about 90%, at least about 94%, at least about 95%, at least about 96%, at least about 97%, at least about 98%, or at least about 99%, sequence identity, homology and/or functional equivalence to any of SEQ ID NO: 383-465 or 912-994 with one or more copies of one or more of the following viral immunosuppressive amino acid sequences: SEQ ID NO: 199-216, 220, 225, 230, 235, 240, 245, 250, 273, 280, 288, or 289 integrated into the sequence of any of SEQ ID NO: 383-465 or 912-994. In addition to, or in place of the integrated viral immunosuppressive amino acid, the CAR optionally comprises an amino acid of any of SEQ ID NO: 383-465 or 912-994, or comprises an amino acid sequence with at least about 80%, at least about 85%, at least about 90%, at least about 94%, at least about 95%, at least about 96%, at least about 97%, at least about 98%, or at least about 99%, sequence identity, homology and/or functional equivalence to SEQ ID NO: 383-465 or 912-994, with one or more of the viral immunosuppressive sequences expressed on the cell in a membrane-bound format, as discussed below. It is contemplated that any of the amino acid sequences provided herein may be provided with or without a signal sequence (e.g., a CD8a signal sequence, such as MALPVTALLLPLALLLHAARP). It is also contemplated that any of the amino acid sequences provided herein may be provided with or without an initial methionine (M) residue.

[0291] In addition to incorporation of the viral immunosuppressive peptides being positioned in the CAR, the peptides can be coupled to a domain that allows them to be expressed as a membrane bound viral immunosuppressive peptide.

[0292] FIGS. 10A-10J show non-limiting schematic depictions of embodiments disclosed herein. FIG. 10A shows a single viral immunosuppressive peptide coupled to a transmembrane protein. FIG. 10B shows two individual viral immunosuppressive peptides, each coupled to a transmembrane protein. FIG. 10C shows a plurality of viral immunosuppressive peptides in a membrane-bound format. As shown, and described herein, both the viral immunosuppressive peptide and the transmembrane domain can vary, or can be the same. In other words, provided for herein are combinations such as viral immunosuppressive peptide (VIP) 1: transmembrane protein (TM) 1; VIP2:TM1; VIP2:TM2; VIP1:TM2; VIP3:TM1; VIP1:TM3, and the like, including VIPX:TMY.

[0293] FIG. 10D shows an additional non-limiting embodiment wherein multiple viral immunosuppressive peptides are coupled to a single transmembrane protein, with the viral immunosuppressive peptides being the same. FIG. 106E shows an additional non-limiting embodiment with wherein multiple viral immunosuppressive peptides are coupled to a single transmembrane protein, with the viral immunosuppressive peptides being distinct from one another. FIG. 10F shows a further non-limiting embodiment wherein multiple membrane-bound constructs are expressed on a single immune cell, one coupled to a single viral immunosuppressive peptide, and the other coupled to multiple viral immunosuppressive peptide. While not illustrated, it shall be appreciated that the transmembrane domains may differ from one another when multiple constructs are expressed by an individual cell.

[0294] Various transmembrane proteins can be used, such as one or more of CD8α, CD4, CD3ε, CD3γ, CD3δ, CD3ζ, CD28, CD137, glycophorin A, glycophorin D, nicotinic acetylcholine receptor, a GABA receptor, FcεRIγ, and a T-cell receptor. In several embodiments, a portion of one or more of these domains (e.g., a transmembrane domain) is used to anchor or otherwise tether the viral immunosuppressive peptide(s) to the immune cell surface. In several embodiments, the transmembrane protein comprises a CD8α transmembrane domain. In several embodiments, the CD8α transmembrane domain comprises the amino acid sequence of SEQ ID NO: 4 (IYIWAPLAGTCGVLLLSLVIT), or a sequence with at least about 80%, at least about 85%, about 90%, about 95%, about 96%, about 97%, about 98% or about 99% sequence identity with SEQ ID NO: 4. In several embodiments, the CD8α transmembrane domain is encoded by the nucleic acid sequence of SEQ ID NO: 3, or a sequence with at least about 80%, at least about 85%, about 90%, about 95%, about 96%, about 97%, about 98% or about 99% sequence identity with SEQ ID NO: 3. In several embodiments, a hinge or other linker is used to couple the viral immunosuppressive peptide to the transmembrane protein. In several embodiments, a CD8α is used. In several embodiments, the CD8α hinge comprises the amino acid sequence of SEQ ID NO: 2 (TTTPAPRPPTPAPTIASQPLSLRPEACRPAAGGAVHTRGLDFACD), or a sequence with at least about 80%, at least about 85%, about 90%, about 95%, about 96%, about 97%, about 98% or about 99% sequence identity with SEQ ID NO: 2. In several embodiments, the CD8α hinge comprises the amino acid sequence of SEQ ID NO: 1, or a sequence with at least about 80%, at least about 85%, about 90%, about 95%, about 96%, about 97%, about 98% or about 99% sequence identity with SEQ ID NO: 1.

[0295] FIG. 10G shows an additional schematic of a non-limiting embodiment provided for herein. This embodiment comprises an immune cell engineered to express a CAR as well as a membrane-bound viral immunosuppressive peptide. FIG. 10G shows a non-limiting embodiment wherein the immune cell expresses a CAR along with a plurality of viral immunosuppressive peptides coupled to a transmembrane domain. Also provided for are immune cells (e.g., NK cells, T cells or combinations there) expressing a CAR and multiple membrane bound viral immunosuppressive peptides (e.g., as in FIG. 10F). In several embodiments, the CAR comprises one or more viral immunosuppressive peptides, while some embodiments involve expression of a CAR without a viral immunosuppressive peptide. As shown in these schematic figures, the immune cells engineered, in several embodiments, are allogeneic cells. In several embodiments, allogeneic NK cells are used. In several embodiments, allogeneic T cells are used. In several embodiments, combinations (e.g., a mixed population) of allogeneic NK cell and allogeneic T cells are used.

[0296] In several embodiments, there is provided a polynucleotide encoding a synthetic CKS-17 viral immunosuppressive peptide. In several embodiments, the CKS-17 viral immunosuppressive peptide comprises the amino acid sequence set forth in SEQ ID NO:199 (LQNRRGLDLLFLKEGGL). In several embodiments, the polynucleotide encodes an amino acid sequence comprising SEQ ID NO: 199. In several embodiments, the polynucleotide encodes a sequence that shares at least about 80%, at least about 85%, at least about 90%, at least about 94%, at least about 95%, at least about 96%, at least about 97%, at least about 98%, or at least about 99%, sequence identity, homology and/or functional equivalence with SEQ ID NO: 199. In several embodiments, the polynucleotide comprises SEQ ID NO: 216 or shares at least about 80%, at least about 85%, at least about 90%, at least about 94%, at least about 95%, at least about 96%, at least about 97%, at least about 98%, or at least about 99%, sequence identity with SEQ ID NO: 216. In several embodiments, provided for is a membrane-bound synthetic CKS-17 viral immunosuppressive peptide. In several embodiments, the synthetic CKS-17 viral immunosuppressive peptide is coupled to a CD8α transmembrane protein and/or CD8α hinge domain. In several embodiments, the membrane-bound synthetic CKS-17 viral immunosuppressive peptide construct comprises one or more linker sequences. In several embodiments, the membrane-bound synthetic CKS-17 viral immunosuppressive peptide comprises a CD8α signal peptide, synthetic CKS-17, a CD8α hinge, and a CD8α transmembrane domain. In several embodiments, the membrane-bound synthetic CKS-17 viral immunosuppressive peptide construct is encoded by a polynucleotide that encodes an amino acid sequence comprising SEQ ID NO: 1028 (LQNRRGLDLLFLKEGGLTTTPAPRPPTPAPTIASQPLSLRPEACRPAAGGAVHTRGLDFACDIYIWAPLAGT CGVLLLSLVITLYC) (e.g., SEQ ID NO: 218) or SEQ ID NO: 1029 (LQNRRGLDLLFLKEGGLTTTPAPRPPTPAPTIASQPLSLRPEACRPAAGGAVHTRGLDFACDIYIWAPLAGT CGVLLLSLVITLYC) (e.g., SEQ ID NO: 693). In several embodiments, the polynucleotide encodes a sequence that shares at least about 80%, at least about 85%, at least about 90%, at least about 94%, at least about 95%, at least about 96%, at least about 97%, at least about 98%, or at least about 99%, sequence identity, homology and/or functional equivalence with SEQ ID NO: 218 or SEQ ID NO: 693. In several embodiments, the polynucleotide comprises SEQ ID NO: 219 (or SEQ ID NO: 694) or shares at least about 80%, at least about 85%, at least about 90%, at least about 94%, at least about 95%, at least about 96%, at least about 97%, at least about 98%, or at least about 99%, sequence identity with SEQ ID NO: 219 (or SEQ ID NO: 694). Optionally, the polynucleotide encodes a detectable tag (e.g., a FLAG tag) and/or can comprise an internal ribosome entry site (IRES) that allows for expression of an additional protein, such as a detectable tag (e.g., GFP). In several embodiments, the polynucleotide encoding membrane-bound synthetic CKS-17 and GFP comprises SEQ ID NO: 217 or shares at least about 80%, at least about 85%, at least about 90%, at least about 94%, at least about 95%, at least about 96%, at least about 97%, at least about 98%, or at least about 99%, sequence identity with SEQ ID NO: 217. In several embodiments, the polynucleotide encoding membrane-bound synthetic CKS-17, a FLAG tag, and GFP comprises SEQ ID NO: 692 or shares at least about 80%, at least about 85%, at least about 90%, at least about 94%, at least about 95%, at least about 96%, at least about 97%, at least about 98%, or at least about 99%, sequence identity with SEQ ID NO: 692. In several embodiments, the polynucleotide encoding membrane-bound synthetic CKS-17, a FLAG tag, and GFP encodes the amino acid sequence of SEQ ID NO: 691 or an amino acid sequence that shares at least about 80%, at least about 85%, at least about 90%, at least about 94%, at least about 95%, at least about 96%, at least about 97%, at least about 98%, or at least about 99%, sequence identity with SEQ ID NO: 691.

[0297] In several embodiments, the membrane-bound synthetic CKS-17 viral immunosuppressive peptide construct comprises the amino acid sequence set forth in SEQ ID NO: 1028 or 1029. In several embodiments, the membrane-bound synthetic CKS-17 viral immunosuppressive peptide construct comprises an amino acid sequence with at least about 80%, at least about 85%, at least about 90%, at least about 94%, at least about 95%, at least about 96%, at least about 97%, at least about 98%, or at least about 99%, sequence identity to SEQ ID NO: 1028 or SEQ ID NO: 1029.

[0298] In several embodiments, there is provided a polynucleotide encoding a p15E viral immunosuppressive peptide. In several embodiments, the p15E viral immunosuppressive peptide comprises the amino acid sequence set forth in SEQ ID NO:220 (LQNRRGLDLLFLKEGGLCAALKEECCFY). In several embodiments, the polynucleotide encodes an amino acid sequence comprising SEQ ID NO: 220. In several embodiments, the polynucleotide encodes a sequence that shares at least about 80%, at least about 85%, at least about 90%, at least about 94%, at least about 95%, at least about 96%, at least about 97%, at least about 98%, or at least about 99%, sequence identity, homology and/or functional equivalence with SEQ ID NO: 220. In several embodiments, the polynucleotide comprises SEQ ID NO: 221 or shares at least about 80%, at least about 85%, at least about 90%, at least about 94%, at least about 95%, at least about 96%, at least about 97%, at least about 98%, or at least about 99%, sequence identity with SEQ ID NO: 221. In several embodiments, provided for is a membrane-bound p15E viral immunosuppressive peptide. In several embodiments, the p15E viral immunosuppressive peptide is coupled to a CD8α transmembrane protein and/or CD8α hinge domain. In several embodiments, the membrane-bound p15E viral immunosuppressive peptide construct comprises one or more linker sequences. In several embodiments, the membrane-bound p15E viral immunosuppressive peptide comprises a CD8α signal peptide, p15E, a CD8α hinge, and a CD8α transmembrane domain. In several embodiments, the membrane-bound p15E viral immunosuppressive peptide construct is encoded by a polynucleotide that encodes an amino acid sequence comprising SEQ ID NO: 1030 (LQNRRGLDLLFLKEGGLCAALKEECCFTTTPAPRPPTPAPTIASQPLSLRPEACRPAAGGAVHTRGLDFACD IYIWAPLAGTCGVLLLSLVITLYC) (e.g., SEQ ID NO: 223) or SEQ ID NO: 1031 (LQNRRGLDLLFLKEGGLCAALKEECCFYTTTPAPRPPTPAPTIASQPLSLRPEACRPAAGGAVHTRGLDFAC DIYIWAPLAGTCGVLLLSLVITLYC) (e.g., SEQ ID NO: 697). In several embodiments, the polynucleotide encodes a sequence that shares at least about 90%, at least about 94%, at least about 95%, at least about 96%, at least about 97%, at least about 98%, or at least about 99%, sequence identity, homology and/or functional equivalence with SEQ ID NO: 1030 (or SEQ ID NO: 223 or SEQ ID NO: 697). In several embodiments, the polynucleotide comprises SEQ ID NO: 1031 (or SEQ ID NO: 224 or SEQ ID NO: 698) or shares at least about 80%, at least about 85%, at least about 90%, at least about 94%, at least about 95%, at least about 96%, at least about 97%, at least about 98%, or at least about 99%, sequence identity with SEQ ID NO: 1031 (or SEQ ID NO: 224 or SEQ ID NO: 698). Optionally, the polynucleotide encodes a detectable tag (e.g., a FLAG tag) and/or can comprise an internal ribosome entry site (IRES) that allows for expression of an additional protein, such as a detectable tag (e.g., GFP). In several embodiments, the polynucleotide encoding mbp15E and GFP comprises SEQ ID NO: 222 or shares at least about 80%, at least about 85%, at least about 90%, at least about 94%, at least about 95%, at least about 96%, at least about 97%, at least about 98%, or at least about 99%, sequence identity with SEQ ID NO: 222. In several embodiments, the polynucleotide encoding mbp15E, a FLAG tag, and GFP comprises SEQ ID NO: 696 or shares at least about 80%, at least about 85%, at least about 90%, at least about 94%, at least about 95%, at least about 96%, at least about 97%, at least about 98%, or at least about 99%, sequence identity with SEQ ID NO: 696. In several embodiments, the membrane-bound p15E viral immunosuppressive peptide construct including GFP and a FLAG tag is encoded by a polynucleotide that encodes an amino acid sequence comprising SEQ ID NO: 695). In several embodiments, the polynucleotide encodes a sequence that shares at least about 90%, at least about 94%, at least about 95%, at least about 96%, at least about 97%, at least about 98%, or at least about 99%, sequence identity, homology and/or functional equivalence with SEQ ID NO: 695).

[0299] In several embodiments, the membrane-bound p15E viral immunosuppressive peptide construct comprises the amino acid sequence set forth in SEQ ID NO: 1030 or 1031. In several embodiments, the membrane-bound p15E viral immunosuppressive peptide construct comprises an amino acid sequence with at least about 80%, at least about 85%, at least about 90%, at least about 94%, at least about 95%, at least about 96%, at least about 97%, at least about 98%, or at least about 99%, sequence identity to SEQ ID NO: 1030 or SEQ ID NO: 1031.

[0300] In several embodiments, there is provided a polynucleotide encoding a HTLV viral immunosuppressive peptide. In several embodiments, the HTLV viral immunosuppressive peptide comprises the amino acid sequence set forth in SEQ ID NO:225 (AQNRRGLDLLFWEQGGLCKALQEQCRFP). In several embodiments, the polynucleotide encodes an amino acid sequence comprising SEQ ID NO: 225. In several embodiments, the polynucleotide encodes a sequence that shares at least about 80%, at least about 85%, at least about 90%, at least about 94%, at least about 95%, at least about 96%, at least about 97%, at least about 98%, or at least about 99%, sequence identity, homology and/or functional equivalence with SEQ ID NO: 225. In several embodiments, the polynucleotide comprises SEQ ID NO: 226 or shares at least about 80%, at least about 85%, at least about 90%, at least about 94%, at least about 95%, at least about 96%, at least about 97%, at least about 98%, or at least about 99%, sequence identity with SEQ ID NO: 226. In several embodiments, provided for is a membrane-bound HTLV viral immunosuppressive peptide. In several embodiments, the HTLV viral immunosuppressive peptide is coupled to a CD8α transmembrane protein and/or CD8α hinge domain. In several embodiments, the membrane-bound HTLV viral immunosuppressive peptide construct comprises one or more linker sequences. In several embodiments, the membrane-bound HTLV viral immunosuppressive peptide comprises a CD8α signal peptide, HTLV-1 (Gp21), a CD8α hinge, a and a CD8α transmembrane domain. In several embodiments, the membrane-bound HTLV viral immunosuppressive peptide construct is encoded by a polynucleotide that encodes an amino acid sequence comprising SEQ ID NO: 1032 (AQNRRGLDLLFWEQTTTPAPRPPTPAPTIASQPLSLRPEACRPAAGGAVHTRGLDFACDIYIWAPLAGTCG VLLLSLVITLYC), (e.g., SEQ ID NO: 228) or SEQ ID NO:1033 (AQNRRGLDLLFWEQGGLCKALQEQCRFPTTTPAPRPPTPAPTIASQPLSLRPEACRPAAGGAVHTRGLDFA CDIYIWAPLAGTCGVLLLSLVITLYC), (e.g., SEQ ID NO: 701). In several embodiments, the polynucleotide encodes an amino acid sequence that shares at least about 80%, at least about 85%, at least about 90%, at least about 94%, at least about 95%, at least about 96%, at least about 97%, at least about 98%, or at least about 99%, sequence identity, homology and/or functional equivalence with SEQ ID NO: 228 (or SEQ ID NO: 701). In several embodiments, the polynucleotide comprises SEQ ID NO: 229 (or SEQ ID NO: 702) or shares at least about 90%, at least about 94%, at least about 95%, at least about 96%, at least about 97%, at least about 98%, or at least about 99%, sequence identity with SEQ ID NO: 229 (or SEQ ID NO: 702). Optionally, the polynucleotide encodes a detectable tag (e.g., a FLAG tag) and/or can comprise an internal ribosome entry site (IRES) that allows for expression of an additional protein, such as a detectable tag (e.g., GFP). In several embodiments, the polynucleotide encoding membrane-bound HTLV and GFP comprises SEQ ID NO: 227 or shares at least about 80%, at least about 85%, at least about 90%, at least about 94%, at least about 95%, at least about 96%, at least about 97%, at least about 98%, or at least about 99%, sequence identity with SEQ ID NO: 227. In several embodiments, the polynucleotide encoding membrane-bound HTLV, a FLAG tag, and GFP comprises SEQ ID NO: 700 or shares at least about 80%, at least about 85%, at least about 90%, at least about 94%, at least about 95%, at least about 96%, at least about 97%, at least about 98%, or at least about 99%, sequence identity with SEQ ID NO: 700. In several embodiments, the membrane-bound HTLV, FLAG tag, GFP construct comprises the amino acid sequence of SEQ ID NO: 699 or shares at least about 80%, at least about 85%, at least about 90%, at least about 94%, at least about 95%, at least about 96%, at least about 97%, at least about 98%, or at least about 99%, sequence identity with SEQ ID NO: 699.

[0301] In several embodiments, the membrane-bound HTLV viral immunosuppressive peptide construct comprises the amino acid sequence set forth in SEQ ID NO: 1032 or 1033. In several embodiments, the membrane-bound HTLV viral immunosuppressive peptide construct comprises an amino acid sequence with at least about 80%, at least about 85%, at least about 90%, at least about 94%, at least about 95%, at least about 96%, at least about 97%, at least about 98%, or at least about 99%, sequence identity to SEQ ID NO: 1032 or SEQ ID NO: 1033.

[0302] In several embodiments, there is provided a polynucleotide encoding a modified HIV Gp41 viral immunosuppressive peptide. In some embodiments, the modified HIV Gp41 viral immunosuppressive peptide comprises the amino acid sequence set forth in SEQ ID NO:230 (GALFLGFLGAAGSTMGAASVTLTVQARQLLSGIVQQQSNLLRAIEAQQHMLQLTVWGIKQLQARVLAVE RYLKDQ). In several embodiments, the polynucleotide encodes an amino acid sequence comprising SEQ ID NO: 230. In several embodiments, the polynucleotide encodes a sequence that shares at least about 80%, at least about 85%, at least about 90%, at least about 94%, at least about 95%, at least about 96%, at least about 97%, at least about 98%, or at least about 99%, sequence identity, homology and/or functional equivalence with SEQ ID NO: 230. In several embodiments, the polynucleotide comprises SEQ ID NO: 231 or shares at least about 80%, at least about 85%, at least about 90%, at least about 94%, at least about 95%, at least about 96%, at least about 97%, at least about 98%, or at least about 99%, sequence identity with SEQ ID NO: 231. In several embodiments, provided for is a membrane-bound modified HIV Gp41 viral immunosuppressive peptide. In several embodiments, the modified HIV Gp41 viral immunosuppressive peptide is coupled to a CD8α transmembrane protein and/or CD8α hinge domain. In several embodiments, the membrane-bound modified HIV Gp41 viral immunosuppressive peptide construct comprises one or more linker sequences. In several embodiments, the membrane-bound modified HIV Gp41 viral immunosuppressive peptide comprises a CD8α signal peptide, modified HIV Gp41, a CD8α hinge, a and a CD8α transmembrane domain. In several embodiments, the membrane-bound modified HIV Gp41 viral immunosuppressive peptide construct is encoded by a polynucleotide that encodes an amino acid sequence comprising SEQ ID NO: 1034 (GALFLGFLGAAGSTMGAASVTLTVQARQLLSGIVQQQSNLLRAIEAQQHMLQLTVWGIKQLQARVLAVE RYLKDQTTTPAPRPPTPAPTIASQPLSLRPEACRPAAGGAVHTRGLDFACDIYIWAPLAGTCGVLLLSLVITL YC), (e.g., SEQ ID NO: 233) or SEQ ID NO: 1035 (GALFLGFLGAAGSTMGAASVTLTVQARLLLSGIVQQQNNLLRAIEAQQHLLQLTVWGIKQLQARVLAVE RYLRDQTTTPAPRPPTPAPTIASQPLSLRPEACRPAAGGAVHTRGLDFACDIYIWAPLAGTCGVLLLSLVITL YC), (e.g., SEQ ID NO: 705). In several embodiments, the polynucleotide encodes a sequence that shares at least about 90%, at least about 94%, at least about 95%, at least about 96%, at least about 97%, at least about 98%, or at least about 99%, sequence identity, homology and/or functional equivalence with SEQ ID NO: 233 (or SEQ ID NO: 705). In several embodiments, the polynucleotide comprises SEQ ID NO: 234 (or SEQ ID NO: 706) or shares at least about 80%, at least about 85%, at least about 90%, at least about 94%, at least about 95%, at least about 96%, at least about 97%, at least about 98%, or at least about 99%, sequence identity with SEQ ID NO: 234 (or SEQ ID NO: 706). Optionally, the polynucleotide encodes a detectable tag (e.g., a FLAG tag) and/or can comprise an internal ribosome entry site (IRES) that allows for expression of an additional protein, such as a detectable tag (e.g., GFP). In several embodiments, the polynucleotide encoding membrane-bound modified HIV Gp41 and GFP comprises SEQ ID NO: 232 or shares at least about 80%, at least about 85%, at least about 90%, at least about 94%, at least about 95%, at least about 96%, at least about 97%, at least about 98%, or at least about 99%, sequence identity with SEQ ID NO: 232. In several embodiments, the polynucleotide encoding membrane-bound modified HIV Gp41, a FLAG tag, and GFP comprises SEQ ID NO: 704 or shares at least about 80%, at least about 85%, at least about 90%, at least about 94%, at least about 95%, at least about 96%, at least about 97%, at least about 98%, or at least about 99%, sequence identity with SEQ ID NO: 704. In several embodiments, the membrane-bound modified HIV Gp41, FLAG tag, GFP construct comprises the amino acid sequence of SEQ ID NO: 703 or an amino acid that shares at least about 80%, at least about 85%, at least about 90%, at least about 94%, at least about 95%, at least about 96%, at least about 97%, at least about 98%, or at least about 99%, sequence identity with SEQ ID NO: 703.

[0303] In several embodiments, there is provided a polynucleotide encoding a truncated HIV Gp41 viral immunosuppressive peptide. In some embodiments, the truncated HIV Gp41 viral immunosuppressive peptide comprises the amino acid sequence set forth in SEQ ID NO:235 (LQARILAVERYLKD). In several embodiments, the polynucleotide encodes an amino acid sequence comprising SEQ ID NO: 235. In several embodiments, the polynucleotide encodes a sequence that shares at least about 80%, at least about 85%, at least about 90%, at least about 94%, at least about 95%, at least about 96%, at least about 97%, at least about 98%, or at least about 99%, sequence identity, homology and/or functional equivalence with SEQ ID NO: 235. In several embodiments, the polynucleotide comprises SEQ ID NO: 236 or shares at least about 80%, at least about 85%, at least about 90%, at least about 94%, at least about 95%, at least about 96%, at least about 97%, at least about 98%, or at least about 99%, sequence identity with SEQ ID NO: 236. In several embodiments, provided for is a membrane-bound HIV Gp41 viral immunosuppressive peptide. In several embodiments, the HIV Gp41 viral immunosuppressive peptide is coupled to a CD8α transmembrane protein and/or CD8α hinge domain. In several embodiments, the membrane-bound HIV Gp41 viral immunosuppressive peptide construct comprises one or more linker sequences. In several embodiments, the membrane-bound HIV Gp41 viral immunosuppressive peptide comprises a CD8α signal peptide, HIV Gp41, a CD8α hinge, a and a CD8α transmembrane domain. In several embodiments, the membrane-bound HIV Gp41 viral immunosuppressive peptide construct is encoded by a polynucleotide that encodes an amino acid sequence comprising SEQ ID NO: 1036 (LQARILAVERYLKDTTTPAPRPPTPAPTIASQPLSLRPEACRPAAGGAVHTRGLDFACDIYIWAPLAGTCGV LLLSLVITLYC), (e.g., SEQ ID NO: 238) or SEQ ID NO: 1037 (LQARILAVERYLKDTTTPAPRPPTPAPTIASQPLSLRPEACRPAAGGAVHTRGLDFACDIYIWAPLAGTCGV LLLSLVITLYC), (e.g., SEQ ID NO: 709). In several embodiments, the polynucleotide encodes a sequence that shares at least about 80%, at least about 85%, at least about 90%, at least about 94%, at least about 95%, at least about 96%, at least about 97%, at least about 98%, or at least about 99%, sequence identity, homology and/or functional equivalence with SEQ ID NO: 238 (or SEQ ID NO: 709). In several embodiments, the polynucleotide comprises SEQ ID NO: 239 (or SEQ ID NO: 710) or shares at least about 80%, at least about 85%, at least about 90%, at least about 94%, at least about 95%, at least about 96%, at least about 97%, at least about 98%, or at least about 99%, sequence identity with SEQ ID NO: 239 (or SEQ ID NO: 710). Optionally, the polynucleotide encodes a detectable tag (e.g., a FLAG tag) and/or can comprise an internal ribosome entry site (IRES) that allows for expression of an additional protein, such as a detectable tag (e.g., GFP). In several embodiments, the polynucleotide encoding membrane-bound HIV Gp41 and GFP comprises SEQ ID NO: 237 or shares at least about 80%, at least about 85%, at least about 90%, at least about 94%, at least about 95%, at least about 96%, at least about 97%, at least about 98%, or at least about 99%, sequence identity with SEQ ID NO: 237. In several embodiments, the polynucleotide encoding membrane-bound HIV Gp41, a FLAG tag, and GFP comprises SEQ ID NO: 708 or shares at least about 80%, at least about 85%, at least about 90%, at least about 94%, at least about 95%, at least about 96%, at least about 97%, at least about 98%, or at least about 99%, sequence identity with SEQ ID NO: 708. In several embodiments, the membrane-bound truncated HIV Gp41, FLAG tag, GFP construct comprises the amino acid sequence of SEQ ID NO: 707 or an amino acid that shares at least about 80%, at least about 85%, at least about 90%, at least about 94%, at least about 95%, at least about 96%, at least about 97%, at least about 98%, or at least about 99%, sequence identity with SEQ ID NO: 707.

[0304] In several embodiments, there is provided a polynucleotide encoding a synthetic viral immunosuppressive peptide. In some embodiments, the synthetic viral immunosuppressive peptide comprises the amino acid sequence set forth in SEQ ID NO:240 (AGFGLLLGF). In several embodiments, the polynucleotide encodes an amino acid sequence comprising SEQ ID NO: 240. In several embodiments, the polynucleotide encodes a sequence that shares at least about 80%, at least about 85%, at least about 90%, at least about 94%, at least about 95%, at least about 96%, at least about 97%, at least about 98%, or at least about 99%, sequence identity, homology and/or functional equivalence with SEQ ID NO: 240. In several embodiments, the polynucleotide comprises SEQ ID NO: 241 or shares at least about 80%, at least about 85%, at least about 90%, at least about 94%, at least about 95%, at least about 96%, at least about 97%, at least about 98%, or at least about 99%, sequence identity with SEQ ID NO: 241. In several embodiments, provided for is a membrane-bound synthetic viral immunosuppressive peptide. In several embodiments, the synthetic viral immunosuppressive peptide is coupled to a CD8α transmembrane protein and/or CD8α hinge domain. In several embodiments, the membrane-bound synthetic viral immunosuppressive peptide construct comprises one or more linker sequences. In several embodiments, the membrane-bound synthetic viral immunosuppressive peptide comprises a CD8α signal peptide, a synthetic viral immunosuppressive peptide trimer, a CD8α hinge, a and a CD8α transmembrane domain. In several embodiments, the membrane-bound synthetic viral immunosuppressive peptide construct is encoded by a polynucleotide that encodes an amino acid sequence comprising SEQ ID NO: 1038 (AGFGLLLGFGGGGSGGGGSGGGGSAGFGLLLGFGGGGSGGGGSGGGGSAGFGLLLGFTTTPAPRPPTPAP TIASQPLSLRPEACRPAAGGAVHTRGLDFACDIYIWAPLAGTCGVLLLSLVITLYC), (e.g., SEQ ID NO: 243) or SEQ ID NO: 1039 (AGFGLLLGFGGGGSGGGGSGGGGSAGFGLLLGFGGGGSGGGGSGGGGSAGFGLLLGFTTTPAPRPPTPAP TIASQPLSLRPEACRPAAGGAVHTRGLDFACDIYIWAPLAGTCGVLLLSLVITLYC), (e.g., SEQ ID NO: 713). In several embodiments, the polynucleotide encodes a sequence that shares at least about 80%, at least about 85%, at least about 90%, at least about 94%, at least about 95%, at least about 96%, at least about 97%, at least about 98%, or at least about 99%, sequence identity, homology and/or functional equivalence with SEQ ID NO: 243 (or SEQ ID NO: 713). In several embodiments, the polynucleotide comprises SEQ ID NO: 244 (or SEQ ID NO: 714) or shares at least about 80%, at least about 85%, at least about 90%, at least about 94%, at least about 95%, at least about 96%, at least about 97%, at least about 98%, or at least about 99%, sequence identity with SEQ ID NO: 244 (or SEQ ID NO: 714). Optionally, the polynucleotide encodes a detectable tag (e.g., a FLAG tag) and/or can comprise an internal ribosome entry site (IRES) that allows for expression of an additional protein, such as a detectable tag (e.g., GFP). In several embodiments, the polynucleotide encoding membrane-bound synthetic viral immunosuppressive peptide and GFP comprises SEQ ID NO: 242 or shares at least about 80%, at least about 85%, at least about 90%, at least about 94%, at least about 95%, at least about 96%, at least about 97%, at least about 98%, or at least about 99%, sequence identity with SEQ ID NO: 242. In several embodiments, the polynucleotide encoding membrane-bound synthetic viral immunosuppressive peptide, a FLAG tag and GFP comprises SEQ ID NO: 712 or shares at least about 80%, at least about 85%, at least about 90%, at least about 94%, at least about 95%, at least about 96%, at least about 97%, at least about 98%, or at least about 99%, sequence identity with SEQ ID NO: 712. In several embodiments, membrane-bound synthetic viral immunosuppressive peptide, FLAG tag, GFP construct comprises the amino acid of SEQ ID NO: 712 or shares at least about 80%, at least about 85%, at least about 90%, at least about 94%, at least about 95%, at least about 96%, at least about 97%, at least about 98%, or at least about 99%, sequence identity with SEQ ID NO: 712.

[0305] In several embodiments, viral fusion peptides, or variants thereof, are used. By way of example, HIV initiates an immune evasive response by fusing to a target cell via a fusion peptide, a portion of which interacts with the T cell receptor on host T cells and suppresses their activation. In several embodiments, a portion of a viral fusion peptide is used. For example, in several embodiments, an amino acid sequence comprising residues 5 to 13 of the HIV fusion peptide are used in an immunosuppressive effector as disclosed herein (e.g., incorporated into a CAR at one or more extracellular locations, or with one or more copies coupled to a transmembrane domain). In several embodiments, that amino acid sequence comprises SEQ ID NO: 467. In several embodiments, the amino acid sequence shares at least about 80%, at least about 85%, at least about 90%, at least about 94%, at least about 95%, at least about 96%, at least about 97%, at least about 98%, or at least about 99%, sequence identity, homology and/or functional equivalence with SEQ ID NO: 467. In several embodiments, a modified viral fusion protein is used in an immunosuppressive effector as disclosed herein (e.g., incorporated into a CAR at one or more extracellular locations, or with one or more copies coupled to a transmembrane domain). In several embodiments, that amino acid sequence comprises SEQ ID NO: 468. In several embodiments, the amino acid sequence shares at least about 80%, at least about 85%, at least about 90%, at least about 94%, at least about 95%, at least about 96%, at least about 97%, at least about 98%, or at least about 99%, sequence identity, homology and/or functional equivalence with SEQ ID NO: 468. In several embodiments, one or more consensus motifs derived from a viral fusion protein are used in an immunosuppressive effector as disclosed herein (e.g., incorporated into a CAR at one or more extracellular locations, or with one or more copies coupled to a transmembrane domain). In several embodiments, that amino acid consensus sequence comprises GXXXG (SEQ ID NO: 473) or AXXXG (SEQ ID NO: 474), where each X independently is any amino acid. In several embodiments, the amino acid sequence shares at least about 80%, at least about 85%, at least about 90%, at least about 94%, at least about 95%, at least about 96%, at least about 97%, at least about 98%, or at least about 99%, sequence identity, homology and/or functional equivalence with SEQ ID NO: 473 or 474, while maintaining the consensus motif. In several embodiments, these motifs are particularly advantageous in that they are suppressive towards T-cells and not NKs. Thus, in several embodiments, these peptides allow engineered NK cells to be developed without gene editing to reduce/knock out B2M expression and still effect functional reduction in host versus graft rejection (e.g., through T cell suppression alone).

[0306] In several embodiments, there is provided a polynucleotide encoding a p15E viral immunosuppressive trimeric peptide. In some embodiments, the p15E viral immunosuppressive peptide comprises the amino acid sequence set forth in SEQ ID NO:250 (LQNRRGLDLLFLKEGGLCAALKEECCFY). In several embodiments, the polynucleotide encodes an amino acid sequence comprising SEQ ID NO: 250. In several embodiments, the polynucleotide encodes a sequence that shares at least about 80%, at least about 85%, at least about 90%, at least about 94%, at least about 95%, at least about 96%, at least about 97%, at least about 98%, or at least about 99%, sequence identity, homology and/or functional equivalence with SEQ ID NO: 250. In several embodiments, the polynucleotide comprises SEQ ID NO: 251 or shares at least about 80%, at least about 85%, at least about 90%, at least about 94%, at least about 95%, at least about 96%, at least about 97%, at least about 98%, or at least about 99%, sequence identity with SEQ ID NO: 251. In several embodiments, provided for is a membrane-bound p15E viral immunosuppressive trimeric peptide. In several embodiments, the p15E viral immunosuppressive trimeric peptide is coupled to a CD8α transmembrane protein and/or CD8α hinge domain. In several embodiments, the membrane-bound p15E viral immunosuppressive trimeric peptide construct comprises one or more linker sequences (e.g., in between the peptide repeats). In several embodiments, the membrane-bound p15E viral immunosuppressive trimeric peptide comprises a CD8α signal peptide, a first p15E peptide, a linker (e.g., a GS linker), a second p15E peptide, a linker (e.g., a second GS linker), a third p15E peptide, a CD8α hinge, and a CD8α transmembrane domain. In several embodiments, the membrane-bound p15E viral immunosuppressive peptide construct is encoded by a polynucleotide that encodes an amino acid sequence comprising SEQ ID NO: 1040 (LQNRRGLDLLFLKEGGLCAALKEECCFYGGGGSGGGGSGGGGSLQNRRGLDLLFLKEGGLCAALKEECC FYGGGGSGGGGSGGGGSLQNRRGLDLLFLKEGGLCAALKEECCFYTTTPAPRPPTPAPTIASQPLSLRPEAC RPAAGGAVHTRGLDFACDIYIWAPLAGTCGVLLLSLVITLYC), (e.g., SEQ ID NO: 253) or SEQ ID NO: 1041 (LQNRRGLDLLFLKEGGLCAALKEECCFYGGGGSGGGGSGGGGSLQNRRGLDLLFLKEGGLCAALKEECC FYGGGGSGGGGSGGGGSLQNRRGLDLLFLKEGGLCAALKEECCFYTTTPAPRPPTPAPTIASQPLSLRPEAC RPAAGGAVHTRGLDFACDIYIWAPLAGTCGVLLLSLVITLYC), (e.g., SEQ ID NO: 721). In several embodiments, the polynucleotide encodes a sequence that shares at least about 80%, at least about 85%, at least about 90%, at least about 94%, at least about 95%, at least about 96%, at least about 97%, at least about 98%, or at least about 99%, sequence identity, homology and/or functional equivalence with SEQ ID NO: 253 (or SEQ ID NO: 721). In several embodiments, the polynucleotide comprises SEQ ID NO: 254 (or SEQ ID NO: 722) or shares at least about 80%, at least about 85%, at least about 90%, at least about 94%, at least about 95%, at least about 96%, at least about 97%, at least about 98%, or at least about 99%, sequence identity with SEQ ID NO: 254 (or SEQ ID NO: 722). Optionally, the polynucleotide encodes a detectable tag (e.g., a FLAG tag) and/or can comprise an internal ribosome entry site (IRES) that allows for expression of an additional protein, such as a detectable tag (e.g., GFP). In several embodiments, the polynucleotide encoding membrane-bound trimeric p15E and GFP comprises SEQ ID NO: 252 or shares at least about 80%, at least about 85%, at least about 90%, at least about 94%, at least about 95%, at least about 96%, at least about 97%, at least about 98%, or at least about 99%, sequence identity with SEQ ID NO: 252. In several embodiments, the polynucleotide encoding membrane-bound trimeric p15E, a FLAG tag, and GFP comprises SEQ ID NO: 720 or shares at least about 80%, at least about 85%, at least about 90%, at least about 94%, at least about 95%, at least about 96%, at least about 97%, at least about 98%, or at least about 99%, sequence identity with SEQ ID NO: 720. In several embodiments, the membrane-bound trimeric p15E, FLAG tag, GFP construct comprises the amino acid sequence of SEQ ID NO: 719 or an amino acid that shares at least about 80%, at least about 85%, at least about 90%, at least about 94%, at least about 95%, at least about 96%, at least about 97%, at least about 98%, or at least about 99%, sequence identity with SEQ ID NO: 719.

[0307] Chimeric proteins that include one or more viral immunosuppressive peptides are also used, in several embodiments. One such chimeric protein comprises the human cytomegalovirus class I MHC homolog, UL18. As described in more detail below, in several embodiments, UL18 is incorporated into a CAR, or otherwise expressed (e.g., through chimeric UL18-B2M or in a dimer/trimer construct) in order to evade host-NK cell cytotoxicity through the UL18 binding to the NK cell inhibitory receptor LIR-1.

[0308] Additionally, certain sequence domains or even particular residues within viral immunosuppressive peptides can facilitate further engineering of chimeric antigen receptors and their expression. For example, certain residues could be used to engineer CAR dimers, e.g., through disulfide bonding. Such an approach could be utilized to supplement, or replace, the use of bi-specific CARs. For example, rather than engineering a single CAR with, by way of example an anti-CD19 binder and a binder of NKG2D ligands, two separate CARs are engineered, each with cysteine residues positioned in a manner that allowed for the formation of di-sulfide bridges between the two CARs and thus the self-assembly of a dimerized CAR in vivo.

[0309] Advantageously, the use of the viral immunosuppressive peptides can not only serve to help mute the host NK cell response against administered engineered cells, but it can be used for other purposes as well. For example, in some embodiments, an antibody directed to a viral peptide is administered to a subject who has been dosed with a cell product expressing a CAR that comprises one or more viral immunosuppressive peptides. The antibody functions to bind the viral peptide and induce depletion of the CAR-expressing cells (e.g., via antibody-based immune response), thus serving as a safety mechanism or a route to end a treatment. Similarly, during manufacture of an immune cell comprising a CAR with an included viral immunosuppressive peptide, antibody-based detection of the viral immunosuppressive peptide can be used to determine CAR expression levels.

### CD47 and Other Immunosuppressive Peptides, and Combinations with Viral Immunosuppressive Peptides

[0310] In addition to viral immunosuppressive peptides, other immunosuppressive peptides or polypeptides are provided for herein. Like the viral immunosuppressive peptides, these polypeptides may be included in one or more regions of a CAR, or can be expressed in a membrane-bound format. These additional immunosuppressive polypeptides can also be used in connection with one or more viral immunosuppressive peptides (see, e.g., FIGS. 9 and 10 and description of viral peptides above).

[0311] In several embodiments endogenous “self” signals are re-purposed to impart immune evasiveness to engineered immune cells. One such “self” protein is CD47, which impedes phagocytosis (e.g., by macrophages) through signaling through the phagocyte receptor CD172a. In several embodiments, one or more domains (or sub-domains) of CD47 are incorporated into a CAR and/or expressed in an immune cell in a membrane-bound configuration. In several embodiments, the expression of CD47 (in whole or in part) functions to impart to the engineered immune cell the ability to reduce or avoid phagocytosis by host immune cells, thereby enhancing the persistence (and thus functional life-span) of the engineered immune cells.

[0312] Other immunosuppressive peptides are also provided for herein. In several embodiments, PD-L1 (also known as CD274, PDL1, or PDCD1L1) or an immunosuppressive portion thereof is expressed by an engineered immune cell through incorporation into a CAR and/or in a membrane-bound fashion. In several embodiments, one or more TIGIT ligands, including but not limited to PVR (also known as CD155, NECL5, or NECL-5) and CD113 (also known as PROM1 or prominin 1) or an immunosuppressive portion of is expressed by an engineered immune cell through incorporation into a CAR and/or in a membrane-bound fashion. In several embodiments, CD200 or an immunosuppressive portion thereof is expressed by an engineered immune cell through incorporation into a CAR and/or in a membrane-bound fashion. In several embodiments, CD276 (also known as B7-H3) or an immunosuppressive portion thereof is expressed by an engineered immune cell through incorporation into a CAR and/or in a membrane-bound fashion. In several embodiments, B7-H4 (also known as VTCN1, B7S1, or B7X)) or an immunosuppressive portion thereof is expressed by an engineered immune cell through incorporation into a CAR and/or in a membrane-bound fashion. In several embodiments, HVEM (also known as TNFSF14, CD270 or ATAR) or an immunosuppressive portion thereof is expressed by an engineered immune cell through incorporation into a CAR and/or in a membrane-bound fashion. In several embodiments, CEACAM5 (also known as CEA) or an immunosuppressive portion thereof is expressed by an engineered immune cell through incorporation into a CAR and/or in a membrane-bound fashion. In several embodiments, Galectin-9 (also known as LGALS9) or an immunosuppressive portion thereof is expressed by an engineered immune cell through incorporation into a CAR and/or in a membrane-bound fashion. In several embodiments, the expression of these immunosuppressive proteins (in whole or in part) functions to impart to the engineered immune cell the ability to reduce or avoid immune clearance by host immune cells (or other engineered immune cells), thereby enhancing the persistence (and thus functional life-span) of the engineered immune cells.

[0313] As discussed above with respect to the viral immunosuppressive peptides, the engineered immune cells, in several embodiments, are allogeneic cells. In several embodiments, allogeneic NK cells are used. In several embodiments, allogeneic T cells are used. In several embodiments, combinations (e.g., a mixed population) of allogeneic NK cell and allogeneic T cells are used.

[0314] In several embodiments, the engineered CAR comprises one or more copies of one or more of the following amino acid sequences: SEQ ID NO: 245, 280, 285, 286, 288, 289, 1042 or 1043. In several embodiments, the CAR includes an immunosuppressive fragment of SEQ ID NO: 287 or 1044. As discussed above, those sequences (or individual sequence) can be positioned in the hinge region, the N-terminal region or within the target binder region (e.g., within the linker of an scFv). In several embodiments, the CAR comprises an amino acid sequence with at least about 80%, at least about 85%, at least about 90%, at least about 94%, at least about 95%, at least about 96%, at least about 97%, at least about 98%, or at least about 99%, sequence identity, homology and/or functional equivalence with any of SEQ ID NOs: SEQ ID NO: 245, 280, 285, 286, 288, 289, 1042, or 1043 or an immunosuppressive fragment of SEQ ID NO: 287.

[0315] In addition to incorporation of the viral immunosuppressive peptides being positioned in the CAR, these non-viral immunosuppressive polypeptides can be coupled to a domain that allows them to be expressed as a membrane bound polypeptides.

[0316] Various transmembrane proteins can be used, such as one or more of CD8α, CD4, CD3ε, CD3γ, CD3δ, CD3ζ, CD28, CD137, glycophorin A, glycophorin D, nicotinic acetylcholine receptor, a GABA receptor, FcεRIγ, and a T-cell receptor. In several embodiments, a portion of one or more of these domains (e.g., a transmembrane domain) is used to anchor or otherwise tether the immunosuppressive peptide(s) to the immune cell surface. In several embodiments, the transmembrane protein comprises a CD8α transmembrane domain. In several embodiments, the CD8α transmembrane domain comprises the amino acid sequence of SEQ ID NO: 4, or a sequence with at least about 80%, about 85%, about 90%, about 95%, about 96%, about 97%, about 98% or about 99% sequence identity with SEQ ID NO: 4. In several embodiments, the CD8α transmembrane domain is encoded by the nucleic acid sequence of SEQ ID NO: 3, or a sequence with at least about 80%, about 85%, about 90%, about 95%, about 96%, about 97%, about 98% or about 99% sequence identity with SEQ ID NO: 3. In several embodiments, a hinge or other linker is used to couple the immunosuppressive peptide to the transmembrane protein. In several embodiments, a CD8α is used. In several embodiments, the CD8α hinge comprises the amino acid sequence of SEQ ID NO: 2, or a sequence with at least about 80%, about 85%, about 90%, about 95%, about 96%, about 97%, about 98% or about 99% sequence identity with SEQ ID NO: 2. In several embodiments, the CD8α hinge comprises the amino acid sequence of SEQ ID NO: 1, or a sequence with at least about 80%, about 85%, about 90%, about 95%, about 96%, about 97%, about 98% or about 99% sequence identity with SEQ ID NO: 1.

[0317] In several embodiments, there is provided a polynucleotide encoding a truncated CD47 immunosuppressive peptide. In some embodiments, the truncated CD47 immunsuppressive peptide comprises the amino acid sequence set forth in SEQ ID NO:245 (GNYTCEVTELTREGETIIELK). In several embodiments, the polynucleotide encodes an amino acid sequence comprising SEQ ID NO: 245. In several embodiments, the polynucleotide encodes a sequence that shares at least about 80%, at least about 85%, at least about 90%, at least about 94%, at least about 95%, at least about 96%, at least about 97%, at least about 98%, or at least about 99%, sequence identity, homology and/or functional equivalence with SEQ ID NO: 245. In several embodiments, the polynucleotide comprises SEQ ID NO: 246 or shares at least about 80%, at least about 85%, at least about 90%, at least about 94%, at least about 95%, at least about 96%, at least about 97%, at least about 98%, or at least about 99%, sequence identity with SEQ ID NO: 246. In several embodiments, provided for is a membrane-bound truncated CD47 immunosuppressive peptide. In several embodiments, the truncated CD47 immunosuppressive peptide is coupled to a CD8α transmembrane protein and/or CD8α hinge domain. In several embodiments, the membrane-bound truncated CD47 immunosuppressive peptide construct comprises one or more linker sequences. In several embodiments, the membrane-bound truncated CD47 immunosuppressive peptide comprises a CD8α signal peptide, a truncated CD47 peptide (e.g., positions 110-130 of the extracellular domain), a CD8α hinge, and a CD8α transmembrane domain. In several embodiments, the membrane-bound synthetic truncated CD47 immunosuppressive peptide construct is encoded by a polynucleotide that encodes an amino acid sequence comprising SEQ ID NO:1045 (GNYTCEVTELTREGETIIELKTTTPAPRPPTPAPTIASQPLSLRPEACRPAAGGAVHTRGLDFACDIYIWAPL AGTCGVLLLSLVITLYC), (e.g., SEQ ID NO: 248) or SEQ ID NO:1046 (GNYTCEVTELTREGETIIELKTTTPAPRPPTPAPTIASQPLSLRPEACRPAAGGAVHTRGLDFACDIYIWAPL AGTCGVLLLSLVITLYC), (e.g., SEQ ID NO: 717). In several embodiments, the polynucleotide encodes a sequence that shares at least about 80%, at least about 85%, at least about 90%, at least about 94%, at least about 95%, at least about 96%, at least about 97%, at least about 98%, or at least about 99%, sequence identity, homology and/or functional equivalence with SEQ ID NO: 248 or SEQ ID NO: 717). In several embodiments, the polynucleotide comprises SEQ ID NO: 249 (or SEQ ID NO: 718) or shares at least about 80%, at least about 85%, at least about 90%, at least about 94%, at least about 95%, at least about 96%, at least about 97%, at least about 98%, or at least about 99%, sequence identity with SEQ ID NO: 249 (or SEQ ID NO: 718). Optionally, the polynucleotide encodes a detectable tag (e.g., a FLAG tag) and/or can comprise an internal ribosome entry site (IRES) that allows for expression of an additional protein, such as a detectable tag (e.g., GFP). In several embodiments, the polynucleotide encoding membrane-bound truncated CD47 and GFP comprises SEQ ID NO: 247 or shares at least about 80%, at least about 85%, at least about 90%, at least about 94%, at least about 95%, at least about 96%, at least about 97%, at least about 98%, or at least about 99%, sequence identity with SEQ ID NO: 247. In several embodiments, the polynucleotide encoding membrane-bound truncated CD47, a FLAG tag and GFP comprises SEQ ID NO: 716 or shares at least about 80%, at least about 85%, at least about 90%, at least about 94%, at least about 95%, at least about 96%, at least about 97%, at least about 98%, or at least about 99%, sequence identity with SEQ ID NO: 716. In several embodiments, the membrane-bound truncated CD47, FLAG tag, GFP construct comprises the amino acid sequence of SEQ ID NO: 715 or an amino acid that shares at least about 80%, at least about 85%, at least about 90%, at least about 94%, at least about 95%, at least about 96%, at least about 97%, at least about 98%, or at least about 99%, sequence identity with SEQ ID NO: 715.

[0318] As discussed above, any of the viral immunosuppressive peptides may be used in combination with one or more non-viral immunosuppressive peptides.

[0319] In several embodiments, there is provided a polynucleotide encoding a p15E viral immunosuppressive peptide truncated CD47 construct (p15E_tCD47). In several embodiments, provided for is a membrane-bound p15E_tCD47 construct. In several embodiments, the truncated CD47 peptide comprises a peptide corresponding to positions 110-130 of the extracellular domain of CD47. In several embodiments, the p15E_tCD47 construct is coupled to a CD8α transmembrane protein and/or CD8α hinge domain. In several embodiments, the membrane-bound p15E_tCD47 construct comprises one or more linker sequences. In several embodiments, the membrane-bound p15E_tCD47 construct comprises a CD8α signal peptide, a p15E peptide, a linker (e.g., a GS linker), a truncated CD47 peptide, CD8α hinge, and a CD8α transmembrane domain. In several embodiments, the membrane-bound p15E_tCD47 construct is encoded by a polynucleotide that encodes an amino acid sequence comprising SEQ ID NO: 1047 (LQNRRGLDLLFLKEGGLCAALKEECCFYGGGGSGGGGSGGGGSGNYTCEVTELTREGETIIELKTTTPAPR PPTPAPTIASQPLSLRPEACRPAAGGAVHTRGLDFACDIYIWAPLAGTCGVLLLSLVITLYC), (e.g., SEQ ID NO: 256) or SEQ ID NO: 1048 (LQNRRGLDLLFLKEGGLCAALKEECCFYGGGGSGGGGSGGGGSGNYTCEVTELTREGETIIELKTTTPAPR PPTPAPTIASQPLSLRPEACRPAAGGAVHTRGLDFACDIYIWAPLAGTCGVLLLSLVITLYC), (e.g., SEQ ID NO: 725). In several embodiments, the polynucleotide encodes a sequence that shares at least about 80%, at least about 85%, at least about 90%, at least about 94%, at least about 95%, at least about 96%, at least about 97%, at least about 98%, or at least about 99%, sequence identity, homology and/or functional equivalence with SEQ ID NO: 256 (or SEQ ID NO: 725). In several embodiments, the polynucleotide comprises SEQ ID NO: 257 (or SEQ ID NO: 726) or shares at least about 80%, at least about 85%, at least about 90%, at least about 94%, at least about 95%, at least about 96%, at least about 97%, at least about 98%, or at least about 99%, sequence identity with SEQ ID NO: 257 (or SEQ ID NO: 726). Optionally, the polynucleotide encodes a detectable tag (e.g., a FLAG tag) and/or can comprise an internal ribosome entry site (IRES) that allows for expression of an additional protein, such as a detectable tag (e.g., GFP). In several embodiments, the polynucleotide encoding the membrane-bound p15E_tCD47 construct and GFP comprises SEQ ID NO: 255 or shares at least about 80%, at least about 85%, at least about 90%, at least about 94%, at least about 95%, at least about 96%, at least about 97%, at least about 98%, or at least about 99%, sequence identity with SEQ ID NO: 255. In several embodiments, the polynucleotide encoding the membrane-bound p15E_tCD47 construct, a FLAG tag, and GFP comprises SEQ ID NO: 724 or shares at least about 80%, at least about 85%, at least about 90%, at least about 94%, at least about 95%, at least about 96%, at least about 97%, at least about 98%, or at least about 99%, sequence identity with SEQ ID NO: 724. In several embodiments, the membrane-bound p15E_tCD47, FLAG tag, GFP construct comprises the amino acid sequence of SEQ ID NO: 723 or an amino acid that shares at least about 80%, at least about 85%, at least about 90%, at least about 94%, at least about 95%, at least about 96%, at least about 97%, at least about 98%, or at least about 99%, sequence identity with SEQ ID NO: 723.

[0320] In several embodiments, there is provided a polynucleotide encoding a p15E viral immunosuppressive peptide truncated CD47 construct (tCD47_p15E), a swap of the peptides of the construct just described. In several embodiments, provided for is a membrane-bound tCD47_p15E construct. In several embodiments, the truncated CD47 peptide comprises a peptide corresponding to positions 110-130 of the extracellular domain of CD47. In several embodiments, the tCD47_p15E construct is coupled to a CD8α transmembrane protein and/or CD8α hinge domain. In several embodiments, the membrane-bound tCD47_p15E construct comprises one or more linker sequences. In several embodiments, the membrane-bound tCD47_p15E construct comprises a CD8α signal peptide, a truncated CD47 peptide, a linker (e.g., a GS linker), a p15E peptide, a CD8α hinge, and a CD8α transmembrane domain. In several embodiments, the membrane-bound tCD47_p15E construct is encoded by a polynucleotide that encodes an amino acid sequence comprising SEQ ID NO: 1049 (GNYTCEVTELTREGETIIELKGGGGSGGGGSGGGGSLQNRRGLDLLFLKEGGLCAALKEECCFYTTTPAPR PPTPAPTIASQPLSLRPEACRPAAGGAVHTRGLDFACDIYIWAPLAGTCGVLLLSLVITLYC), (e.g., SEQ ID NO: 259) or SEQ ID NO: 1050 (GNYTCEVTELTREGETIIELKGGGGSGGGGSGGGGSLQNRRGLDLLFLKEGGLCAALKEECCFYTTTPAPR PPTPAPTIASQPLSLRPEACRPAAGGAVHTRGLDFACDIYIWAPLAGTCGVLLLSLVITLYC), (e.g., SEQ ID NO: 729). In several embodiments, the polynucleotide encodes a sequence that shares at least about 80%, at least about 85%, at least about 90%, at least about 94%, at least about 95%, at least about 96%, at least about 97%, at least about 98%, or at least about 99%, sequence identity, homology and/or functional equivalence with SEQ ID NO: 259 (or SEQ ID NO: 729). In several embodiments, the polynucleotide comprises SEQ ID NO: 260 (or SEQ ID NO: 730) or shares at least about 80%, at least about 85%, at least about 90%, at least about 94%, at least about 95%, at least about 96%, at least about 97%, at least about 98%, or at least about 99%, sequence identity with SEQ ID NO: 260 (or SEQ ID NO: 730). Optionally, the polynucleotide encodes a detectable tag (e.g., a FLAG tag) and/or can comprise an internal ribosome entry site (IRES) that allows for expression of an additional protein, such as a detectable tag (e.g., GFP). In several embodiments, the polynucleotide encoding the membrane-bound tCD47_p15E construct and GFP comprises SEQ ID NO: 258 or shares at least about 80%, at least about 85%, at least about 90%, at least about 94%, at least about 95%, at least about 96%, at least about 97%, at least about 98%, or at least about 99%, sequence identity with SEQ ID NO: 258. In several embodiments, the polynucleotide encoding the membrane-bound tCD47_p15E construct, a FLAG tag, and GFP comprises SEQ ID NO: 728 or shares at least about 80%, at least about 85%, at least about 90%, at least about 94%, at least about 95%, at least about 96%, at least about 97%, at least about 98%, or at least about 99%, sequence identity with SEQ ID NO: 728. In several embodiments, the membrane-bound tCD47_p15E, FLAG tag, GFP construct comprises the amino acid sequence of SEQ ID NO: 727 or an amino acid that shares at least about 80%, at least about 85%, at least about 90%, at least about 94%, at least about 95%, at least about 96%, at least about 97%, at least about 98%, or at least about 99%, sequence identity with SEQ ID NO: 727.

[0321] In several embodiments, there is provided a polynucleotide encoding a modified HIV Gp41 viral immunosuppressive peptide truncated CD47 construct (HIV_L_tCD47). In several embodiments, provided for is a membrane-bound HIV_L_tCD47 construct. In several embodiments, the truncated CD47 peptide comprises a peptide corresponding to positions 110-130 of the extracellular domain of CD47. In several embodiments, the HIV_L_tCD47 construct is coupled to a CD8α transmembrane protein and/or CD8α hinge domain. In several embodiments, the membrane-bound HIV_L_tCD47 construct comprises one or more linker sequences. In several embodiments, the membrane-bound HIV_L_tCD47 construct comprises a CD8α signal peptide, a modified HIV Gp41 viral immunosuppressive peptide, a linker (e.g., a GS linker), a truncated CD47 peptide, a CD8α hinge, and a CD8α transmembrane domain. In several embodiments, the membrane-bound HIV_L_tCD47 construct is encoded by a polynucleotide that encodes an amino acid sequence comprising SEQ ID NO: 1051 (GALFLGFLGAAGSTMGAASVTLTVQARQLLSGIVQQQSNLLRAIEAQQHMLQLTVWGIKQLQARVLAVE RYLKDQGGGGSGGGGSGGGGSGNYTCEVTELTREGETIIELKTTTPAPRPPTPAPTIASQPLSLRPEACRPAA GGAVHTRGLDFACDIYIWAPLAGTCGVLLLSLVITLYC), (e.g., SEQ ID NO: 262) or SEQ ID NO: 1052 (GALFLGFLGAAGSTMGAASVTLTVQARLLLSGIVQQQNNLLRAIEAQQHLLQLTVWGIKQLQARVLAVE RYLRDQGGGGSGGGGSGGGGSGNYTCEVTELTREGETIIELKTTTPAPRPPTPAPTIASQPLSLRPEACRPAA GGAVHTRGLDFACDIYIWAPLAGTCGVLLLSLVITLYC), (e.g., SEQ ID NO: 733). In several embodiments, the polynucleotide encodes a sequence that shares at least about 80%, at least about 85%, at least about 90%, at least about 94%, at least about 95%, at least about 96%, at least about 97%, at least about 98%, or at least about 99%, sequence identity, homology and/or functional equivalence with SEQ ID NO: 262 (or SEQ ID NO: 733). In several embodiments, the polynucleotide comprises SEQ ID NO: 263 (or SEQ ID NO: 734) or shares at least about 80%, at least about 85%, at least about 90%, at least about 94%, at least about 95%, at least about 96%, at least about 97%, at least about 98%, or at least about 99%, sequence identity with SEQ ID NO: 263 (or SEQ ID NO: 734). Optionally, the polynucleotide encodes a detectable tag (e.g., a FLAG tag) and/or can comprise an internal ribosome entry site (IRES) that allows for expression of an additional protein, such as a detectable tag (e.g., GFP). In several embodiments, the polynucleotide encoding the membrane-bound HIV_L_tCD47 construct and GFP comprises SEQ ID NO: 261 or shares at least about 80%, at least about 85%, at least about 90%, at least about 94%, at least about 95%, at least about 96%, at least about 97%, at least about 98%, or at least about 99%, sequence identity with SEQ ID NO: 261. In several embodiments, the polynucleotide encoding the membrane-bound HIV_L_tCD47 construct, a FLAG tag, and GFP comprises SEQ ID NO: 732 or shares at least about 80%, at least about 85%, at least about 90%, at least about 94%, at least about 95%, at least about 96%, at least about 97%, at least about 98%, or at least about 99%, sequence identity with SEQ ID NO: 732. In several embodiments, the membrane-bound HIV_L_tCD47, FLAG tag, GFP construct comprises the amino acid sequence of SEQ ID NO: 731 or an amino acid that shares at least about 80%, at least about 85%, at least about 90%, at least about 94%, at least about 95%, at least about 96%, at least about 97%, at least about 98%, or at least about 99%, sequence identity with SEQ ID NO: 731.

[0322] In several embodiments, there is provided a polynucleotide encoding an HIV Gp41 viral immunosuppressive peptide truncated CD47 construct (HIV_S_tCD47). In several embodiments, provided for is a membrane-bound HIV_S_tCD47 construct. In several embodiments, the truncated CD47 peptide comprises a peptide corresponding to positions 110-130 of the extracellular domain of CD47. In several embodiments, the HIV_S_tCD47 construct is coupled to a CD8α transmembrane protein and/or CD8α hinge domain. In several embodiments, the membrane-bound HIV_S_tCD47 construct comprises one or more linker sequences. In several embodiments, the membrane-bound HIV_S_tCD47 construct comprises a CD8α signal peptide, an HIV Gp41 viral immunosuppressive peptide, a linker (e.g., a GS linker), a truncated CD47 peptide, a CD8α hinge, and a CD8α transmembrane domain. In several embodiments, the membrane-bound HIV_S_tCD47 construct is encoded by a polynucleotide that encodes an amino acid sequence comprising SEQ ID NO: 1053 (LQARILAVERYLKDGGGGSGGGGSGGGGSGNYTCEVTELTREGETIIELKTTTPAPRPPTPAPTIASQPLSLR PEACRPAAGGAVHTRGLDFACDIYIWAPLAGTCGVLLLSLVITLYC), (e.g., SEQ ID NO: 265) or SEQ ID NO: 1054 (LQARILAVERYLKDGGGGSGGGGSGGGGSGNYTCEVTELTREGETIIELKTTTPAPRPPTPAPTIASQPLSLR PEACRPAAGGAVHTRGLDFACDIYIWAPLAGTCGVLLLSLVITLYC), (e.g., SEQ ID NO: 737). In several embodiments, the polynucleotide encodes a sequence that shares at least about 80%, at least about 85%, at least about 90%, at least about 94%, at least about 95%, at least about 96%, at least about 97%, at least about 98%, or at least about 99%, sequence identity, homology and/or functional equivalence with SEQ ID NO: 265 (or SEQ ID NO: 737). In several embodiments, the polynucleotide comprises SEQ ID NO: 266 (or SEQ ID NO: 738) or shares at least about 80%, at least about 85%, at least about 90%, at least about 94%, at least about 95%, at least about 96%, at least about 97%, at least about 98%, or at least about 99%, sequence identity with SEQ ID NO: 266 (or SEQ ID NO: 738). Optionally, the polynucleotide encodes a detectable tag (e.g., a FLAG tag) and/or can comprise an internal ribosome entry site (IRES) that allows for expression of an additional protein, such as a detectable tag (e.g., GFP). In several embodiments, the polynucleotide encoding the membrane-bound HIV_S_tCD47 construct and GFP comprises SEQ ID NO: 264 or shares at least about 80%, at least about 85%, at least about 90%, at least about 94%, at least about 95%, at least about 96%, at least about 97%, at least about 98%, or at least about 99%, sequence identity with SEQ ID NO: 264. In several embodiments, the polynucleotide encoding the membrane-bound HIV_S_tCD47 construct, a FLAG tag, and GFP comprises SEQ ID NO: 736 or shares at least about 80%, at least about 85%, at least about 90%, at least about 94%, at least about 95%, at least about 96%, at least about 97%, at least about 98%, or at least about 99%, sequence identity with SEQ ID NO: 736. In several embodiments, the membrane-bound HIV_S_tCD47, FLAG tag, GFP construct comprises the amino acid sequence of SEQ ID NO: 735 or an amino acid that shares at least about 80%, at least about 85%, at least about 90%, at least about 94%, at least about 95%, at least about 96%, at least about 97%, at least about 98%, or at least about 99%, sequence identity with SEQ ID NO: 735.

[0323] In several embodiments, there is provided a polynucleotide encoding an HTLV viral immunosuppressive peptide truncated CD47 construct (HTLV_tCD47). In several embodiments, provided for is a membrane-bound HTLV_tCD47 construct. In several embodiments, the truncated CD47 peptide comprises a peptide corresponding to positions 110-130 of the extracellular domain of CD47. In several embodiments, the HTLV_tCD47 construct is coupled to a CD8α transmembrane protein and/or CD8α hinge domain. In several embodiments, the membrane-bound HTLV_tCD47 construct comprises one or more linker sequences. In several embodiments, the membrane-bound HTLV_tCD47 construct comprises a CD8α signal peptide, an HTLV viral immunosuppressive peptide, a linker (e.g., a GS linker), a truncated CD47 peptide, a CD8α hinge, and a CD8α transmembrane domain. In several embodiments, the membrane-bound HTLV_tCD47 construct is encoded by a polynucleotide that encodes an amino acid sequence comprising SEQ ID NO: 1055 (AQNRRGLDLLFWEQGGLCKALQEQCRFPGGGGSGGGGSGGGGSGNYTCEVTELTREGETIIELKTTTPAP RPPTPAPTIASQPLSLRPEACRPAAGGAVHTRGLDFACDIYIWAPLAGTCGVLLLSLVITLYC), (e.g., SEQ ID NO: 268) or SEQ ID NO: 1056 (AQNRRGLDLLFWEQGGLCKALQEQCRFPGGGGSGGGGSGGGGSGNYTCEVTELTREGETIIELKTTTPAP RPPTPAPTIASQPLSLRPEACRPAAGGAVHTRGLDFACDIYIWAPLAGTCGVLLLSLVITLYC), (e.g., SEQ ID NO: 741). In several embodiments, the polynucleotide encodes a sequence that shares at least about 80%, at least about 85%, at least about 90%, at least about 94%, at least about 95%, at least about 96%, at least about 97%, at least about 98%, or at least about 99%, sequence identity, homology and/or functional equivalence with SEQ ID NO: 268 (or SEQ ID NO: 741). In several embodiments, the polynucleotide comprises SEQ ID NO: 269 (or SEQ ID NO: 742) or shares at least about 80%, at least about 85%, at least about 90%, at least about 94%, at least about 95%, at least about 96%, at least about 97%, at least about 98%, or at least about 99%, sequence identity with SEQ ID NO: 269 (or SEQ ID NO: 742). Optionally, the polynucleotide encodes a detectable tag (e.g., a FLAG tag) and/or can comprise an internal ribosome entry site (IRES) that allows for expression of an additional protein, such as a detectable tag (e.g., GFP). In several embodiments, the polynucleotide encoding the membrane-bound HTLV_tCD47 construct and GFP comprises SEQ ID NO: 267 or shares at least about 80%, at least about 85%, at least about 90%, at least about 94%, at least about 95%, at least about 96%, at least about 97%, at least about 98%, or at least about 99%, sequence identity with SEQ ID NO: 267. In several embodiments, the polynucleotide encoding the membrane-bound HTLV_tCD47 construct, a FLAG tag, and GFP comprises SEQ ID NO: 740 or shares at least about 80%, at least about 85%, at least about 90%, at least about 94%, at least about 95%, at least about 96%, at least about 97%, at least about 98%, or at least about 99%, sequence identity with SEQ ID NO: 740. In several embodiments, the membrane-bound HTLV_tCD47, FLAG tag, GFP construct comprises the amino acid sequence of SEQ ID NO: 739 or an amino acid that shares at least about 80%, at least about 85%, at least about 90%, at least about 94%, at least about 95%, at least about 96%, at least about 97%, at least about 98%, or at least about 99%, sequence identity with SEQ ID NO: 739.

[0324] In several embodiments, there is provided a polynucleotide encoding a truncated CD47-p15E-dimer viral immunosuppressive peptide truncated CD47 construct (tCD47_p15Ex2). In several embodiments, provided for is a membrane-bound tCD47_p15Ex2 construct. In several embodiments, the truncated CD47 peptide comprises a peptide corresponding to positions 110-130 of the extracellular domain of CD47. In several embodiments, the tCD47_p15Ex2 construct is coupled to a CD8α transmembrane protein and/or CD8α hinge domain. In several embodiments, the membrane-bound tCD47_p15Ex2 construct comprises one or more linker sequences. In several embodiments, the membrane-bound tCD47_p15Ex2 construct comprises a CD8α signal peptide, a truncated CD47 peptide, a linker (e.g., a GS linker), a first p15E peptide, a linker (e.g., a GS linker), a second p15E peptide, a CD8α hinge, and a CD8α transmembrane domain. In several embodiments, the membrane-bound tCD47_p15Ex2 construct is encoded by a polynucleotide that encodes an amino acid sequence comprising SEQ ID NO: 1057 (GNYTCEVTELTREGETIIELKGGGGSGGGGSGGGGSLQNRRGLDLLFLKEGGLCAALKEECCFYGGGGSG GGGSGGGGSLQNRRGLDLLFLKEGGLCAALKEECCFYTTTPAPRPPTPAPTIASQPLSLRPEACRPAAGGAV HTRGLDFACDIYIWAPLAGTCGVLLLSLVITLYC), (e.g., SEQ ID NO: 271) or SEQ ID NO: 1058 (GNYTCEVTELTREGETIIELKGGGGSGGGGSGGGGSLQNRRGLDLLFLKEGGLCAALKEECCFYGGGGSG GGGSGGGGSLQNRRGLDLLFLKEGGLCAALKEECCFYTTTPAPRPPTPAPTIASQPLSLRPEACRPAAGGAV HTRGLDFACDIYIWAPLAGTCGVLLLSLVITLYC), (e.g., SEQ ID NO: 745). In several embodiments, the polynucleotide encodes a sequence that shares at least about 80%, at least about 85%, at least about 90%, at least about 94%, at least about 95%, at least about 96%, at least about 97%, at least about 98%, or at least about 99%, sequence identity, homology and/or functional equivalence with SEQ ID NO: 271 (or SEQ ID NO: 745). In several embodiments, the polynucleotide comprises SEQ ID NO: 272 (or SEQ ID NO: 746) or shares at least about 80%, at least about 85%, at least about 90%, at least about 94%, at least about 95%, at least about 96%, at least about 97%, at least about 98%, or at least about 99%, sequence identity with SEQ ID NO: 272 (or SEQ ID NO: 746). Optionally, the polynucleotide encodes a detectable tag (e.g., a FLAG tag) and/or can comprise an internal ribosome entry site (IRES) that allows for expression of an additional protein, such as a detectable tag (e.g., GFP). In several embodiments, the polynucleotide encoding the membrane-bound tCD47_p15Ex2 construct and GFP comprises SEQ ID NO: 270 or shares at least about 80%, at least about 85%, at least about 90%, at least about 94%, at least about 95%, at least about 96%, at least about 97%, at least about 98%, or at least about 99%, sequence identity with SEQ ID NO: 270. In several embodiments, the polynucleotide encoding the membrane-bound tCD47_p15Ex2 construct, a FLAG tag, and GFP comprises SEQ ID NO: 744 or shares at least about 80%, at least about 85%, at least about 90%, at least about 94%, at least about 95%, at least about 96%, at least about 97%, at least about 98%, or at least about 99%, sequence identity with SEQ ID NO: 744. In several embodiments, the membrane-bound tCD47_p15Ex2, FLAG tag, GFP construct comprises the amino acid sequence of SEQ ID NO: 743 or an amino acid that shares at least about 80%, at least about 85%, at least about 90%, at least about 94%, at least about 95%, at least about 96%, at least about 97%, at least about 98%, or at least about 99%, sequence identity with SEQ ID NO: 743.

[0325] Additionally, according to several embodiments, combinations and/or replicates of various viral peptides are provided for. See FIGS. 15A and 15B, for example. FIG. 15A shows a non-limiting schematic of construct according to embodiments disclosed herein, in which a domain designed to reduce cytotoxic effects on a cell expressing such a construct (also referred to as a hypoimmune domain) is coupled to at least a transmembrane domain or (as shown in the non-limiting schematic), in some embodiments, integrated into a CAR construct. In several embodiments, viral peptides such as those disclosed herein are integrated into the CAR (e.g., CKS-17, p15E, including p15E-long, and/or HTLV). As shown in FIG. 15B, multimeric formats are provided for, in several embodiments, such as doublet or triplet of p15E (including p15E-long). Viral and non-viral peptides may also be used in combination, such as any of a synthetic TCR blocking peptide, HIV TCR blocking peptides (including truncated formats), an inhibitory receptor peptide (such as tCD47) with any of the other viral peptides disclosed herein. Non-limiting examples include p15E-tCD47, tCD47-p15E, HIV-long-TCD47, HIV-short-tCD47, HTLV-tCD47, and tCD47-p15E (doublet or triplet, optionally long format).

[0326] In several embodiments, there is provided a polynucleotide encoding a synthetic CKS-17 viral immunosuppressive peptide. In several embodiments, provided for is a membrane-bound synthetic CKS-17 viral immunosuppressive peptide. In several embodiments, the synthetic CKS-17 viral immunosuppressive peptide is coupled to a CD8α transmembrane protein and/or CD8α hinge domain. In several embodiments, the membrane-bound synthetic CKS-17 viral immunosuppressive peptide construct comprises one or more linker sequences. In several embodiments, the membrane-bound synthetic CKS-17 viral immunosuppressive peptide comprises a CD8α signal peptide, synthetic CKS-17, a CD8α hinge, and a CD8α transmembrane domain. In some embodiments, the membrane-bound CKS-17 viral immunosuppressive peptide comprises the amino acid sequence set forth in SEQ ID NO:1059 In several embodiments, the membrane-bound synthetic CKS-17 viral immunosuppressive peptide construct is encoded by a polynucleotide that encodes an amino acid sequence comprising SEQ ID NO: 1059 (LQNRRGLDLLFLKEGGLCTTTPAPRPPTPAPTIASQPLSLRPEACRPAAGGAVHTRGLDFACDIYIWAPLAG TCGVLLLSLVITLYC). In several embodiments, the polynucleotide encodes a sequence that shares at least about 80%, at least about 85%, at least about 90%, at least about 94%, at least about 95%, at least about 96%, at least about 97%, at least about 98%, or at least about 99%, sequence identity, homology and/or functional equivalence with SEQ ID NO:1059 (LQNRRGLDLLFLKEGGLCTTTPAPRPPTPAPTIASQPLSLRPEACRPAAGGAVHTRGLDFACDIYIWAPLAG TCGVLLLSLVITLYC.). In several embodiments, the polynucleotide comprises SEQ ID NO: 750 or shares at least about 80%, at least about 85%, at least about 90%, at least about 94%, at least about 95%, at least about 96%, at least about 97%, at least about 98%, or at least about 99%, sequence identity with SEQ ID NO: 750. In several embodiments, the polynucleotide encoding membrane-bound synthetic CKS-17 also encodes GFP (without an IRES or a linker) and comprises SEQ ID NO: 748 or shares at least about 80%, at least about 85%, at least about 90%, at least about 94%, at least about 95%, at least about 96%, at least about 97%, at least about 98%, or at least about 99%, sequence identity with SEQ ID NO: 748. In several embodiments, the membrane-bound synthetic CKS-17-GFP construct comprises SEQ ID NO: 747 or shares at least about 80%, at least about 85%, at least about 90%, at least about 94%, at least about 95%, at least about 96%, at least about 97%, at least about 98%, or at least about 99%, sequence identity with SEQ ID NO: 747.

[0327] In several embodiments, a truncated CD47 immunosuppressive peptide is employed. In some embodiments, the truncated CD47 immunosuppressive peptide comprises the amino acid sequence set forth in SEQ ID NO:1060. In several embodiments, there is provided a polynucleotide that encodes an amino acid sequence comprising SEQ ID NO: 753. In several embodiments, the polynucleotide encodes a sequence that shares at least about 80%, at least about 85%, at least about 90%, at least about 94%, at least about 95%, at least about 96%, at least about 97%, at least about 98%, or at least about 99%, sequence identity, homology and/or functional equivalence with SEQ ID NO: 753. In several embodiments, the polynucleotide comprises SEQ ID NO: 753 or shares at least about 80%, at least about 85%, at least about 90%, at least about 94%, at least about 95%, at least about 96%, at least about 97%, at least about 98%, or at least about 99%, sequence identity with SEQ ID NO: 754. Optionally, the polynucleotide encodes a detectable tag (e.g., a FLAG tag) and/or can comprise an internal ribosome entry site (IRES) that allows for expression of an additional protein, such as a detectable tag (e.g., GFP). In several embodiments, the polynucleotide encoding truncated CD47 and GFP comprises SEQ ID NO: 752 or shares at least about 80%, at least about 85%, at least about 90%, at least about 94%, at least about 95%, at least about 96%, at least about 97%, at least about 98%, or at least about 99%, sequence identity with SEQ ID NO: 752. In several embodiments, the truncated CD47-GFP construct comprises the amino acid sequence of SEQ ID NO: 751 or an amino acid that shares at least about 80%, at least about 85%, at least about 90%, at least about 94%, at least about 95%, at least about 96%, at least about 97%, at least about 98%, or at least about 99%, sequence identity with SEQ ID NO: 751.

[0328] In several embodiments, there is provided a polynucleotide encoding an HIV Gp41 viral immunosuppressive peptide construct that includes a native HIV transmembrane domain (fGP41_HIVtm). In several embodiments, the HIV Gp41 viral immunosuppressive peptide is coupled to a CD8α signal peptide (e.g., for expression purposes, the sequence of which is MALPVTALLLPLALLLHAARP (SEQ ID NO 895) at the amino acid level and ATGGCACTCCCCGTAACTGCTCTGCTGCTGCCGTTGGCATTGCTCCTGCACGCCGCACGCCCG (SEQ ID NO 896) at the nucleotide level). In some embodiments, the HIV GP41 viral immunosuppressive peptide comprises the amino acid sequence set forth in SEQ ID NO:1061. In several embodiments, the HIV Gp41 viral immunosuppressive construct comprises a CD8α signal peptide and HIV Gp41 and is encoded by a polynucleotide that encodes an amino acid sequence comprising SEQ ID NO:757. In several embodiments, the polynucleotide encodes a sequence that shares at least about 80%, at least about 85%, at least about 90%, at least about 94%, at least about 95%, at least about 96%, at least about 97%, at least about 98%, or at least about 99%, sequence identity, homology and/or functional equivalence with SEQ ID NO: 757. In several embodiments, the polynucleotide comprises SEQ ID NO: 758 or shares at least about 80%, at least about 85%, at least about 90%, at least about 94%, at least about 95%, at least about 96%, at least about 97%, at least about 98%, or at least about 99%, sequence identity with SEQ ID NO: 758. Optionally, the polynucleotide encodes a detectable tag (e.g., a FLAG tag) and/or can comprise an internal ribosome entry site (IRES) that allows for expression of an additional protein, such as a detectable tag (e.g., GFP). n several embodiments, a linker (e.g., a GS linker) is positioned between the Gp41 domain and the tag. In several embodiments, the polynucleotide encoding HIV Gp41 and GFP comprises SEQ ID NO: 756 or shares at least about 80%, at least about 85%, at least about 90%, at least about 94%, at least about 95%, at least about 96%, at least about 97%, at least about 98%, or at least about 99%, sequence identity with SEQ ID NO: 756. In several embodiments, the fGP41_HIVtm-GFP construct comprises that amino acid sequence of SEQ ID NO: 755 or an amino acid that shares at least about 80%, at least about 85%, at least about 90%, at least about 94%, at least about 95%, at least about 96%, at least about 97%, at least about 98%, or at least about 99%, sequence identity with SEQ ID NO: 755.

[0329] In several embodiments, there is provided a polynucleotide encoding a p15E transmembrane domain immunosuppressive peptide (p15Etm_sf). In several embodiments, the p15E transmembrane domain is coupled to a CD8α signal peptide (e.g., for expression purposes, the sequence of which is provided for separately herein). In several embodiments, the p15E transmembrane domain comprises the amino acid sequence set forth in SEQ ID NO: 1062. In several embodiments, the p15E transmembrane domain immunosuppressive construct comprises a CD8α signal peptide and the p15E transmembrane domain and is encoded by a polynucleotide that encodes an amino acid sequence comprising SEQ ID NO: 761. In several embodiments, the polynucleotide encodes a sequence that shares at least about 90%, at least about 94%, at least about 95%, at least about 96%, at least about 97%, at least about 98%, or at least about 99%, sequence identity, homology and/or functional equivalence with SEQ ID NO:761. In several embodiments, the polynucleotide comprises SEQ ID NO: 762 or shares at least about 80%, at least about 85%, at least about 90%, at least about 94%, at least about 95%, at least about 96%, at least about 97%, at least about 98%, or at least about 99%, sequence identity with SEQ ID NO: 762. Optionally, the polynucleotide encodes a detectable tag (e.g., a FLAG tag) and/or can comprise an internal ribosome entry site (IRES) that allows for expression of an additional protein, such as a detectable tag (e.g., GFP). In several embodiments, a linker (e.g., a GS linker) is positioned between the p15E transmembrane domain and the tag. In several embodiments, the polynucleotide encoding the p15E transmembrane domain and GFP comprises SEQ ID NO: 760 or shares at least about 80%, at least about 85%, at least about 90%, at least about 94%, at least about 95%, at least about 96%, at least about 97%, at least about 98%, or at least about 99%, sequence identity with SEQ ID NO: 760. In several embodiments, the p15E transmembrane domain-GFP construct comprises the amino acid sequence of SEQ ID NO: 759 or an amino acid that shares at least about 80%, at least about 85%, at least about 90%, at least about 94%, at least about 95%, at least about 96%, at least about 97%, at least about 98%, or at least about 99%, sequence identity with SEQ ID NO: 759.

[0330] In several embodiments, there is provided a polynucleotide encoding a CD43-derived immunosuppressive peptide (fCD43_TM). In several embodiments, the CD43 peptide is coupled to a CD8α signal peptide (e.g., for expression purposes, the sequence of which is provided for separately herein). In several embodiments, the CD43 immunosuppressive construct comprises the amino acid sequence set forth in SEQ ID NO: 1063. In several embodiments, the CD43 immunosuppressive construct comprises a CD8α signal peptide and the CD43 peptide and is encoded by a polynucleotide that encodes an amino acid sequence comprising SEQ ID NO: 765. In several embodiments, the amino acid sequence shares at least about 90%, at least about 94%, at least about 95%, at least about 96%, at least about 97%, at least about 98%, or at least about 99%, sequence identity, homology and/or functional equivalence with SEQ ID NO: 765. In several embodiments, the polynucleotide comprises SEQ ID NO: 766 or shares at least about 80%, at least about 85%, at least about 90%, at least about 94%, at least about 95%, at least about 96%, at least about 97%, at least about 98%, or at least about 99%, sequence identity with SEQ ID NO: 766. Optionally, the polynucleotide encodes a detectable tag (e.g., a FLAG tag) and/or can comprise an internal ribosome entry site (IRES) that allows for expression of an additional protein, such as a detectable tag (e.g., GFP). In several embodiments, a linker (e.g., a GS linker) is positioned between the CD43 and the tag. In several embodiments, the polynucleotide encoding fCD43 and GFP comprises SEQ ID NO: 764 or shares at least about 80%, at least about 85%, at least about 90%, at least about 94%, at least about 95%, at least about 96%, at least about 97%, at least about 98%, or at least about 99%, sequence identity with SEQ ID NO: 764. In several embodiments, the CD43-GFP construct comprises the amino acid sequence of SEQ ID NO: 763 or an amino acid that shares at least about 80%, at least about 85%, at least about 90%, at least about 94%, at least about 95%, at least about 96%, at least about 97%, at least about 98%, or at least about 99%, sequence identity with SEQ ID NO: 763.

[0331] In several embodiments, there is provided a polynucleotide encoding a latent membrane protein 1 (LMP1) peptide of the Epstein-Barr Virus (LMP1_TM). In several embodiments, the LMP1 peptide is coupled to a CD8α signal peptide (e.g., for expression purposes, the sequence of which is provided for separately herein). In several embodiments, the LMP1 immunosuppressive construct comprises the amino acid sequence set forth in SEQ ID NO: 1064. In several embodiments, the LMP1 immunosuppressive construct comprises a CD8α signal peptide and the LMP1 peptide and is encoded by a polynucleotide that encodes an amino acid sequence comprising SEQ ID NO: 769. In several embodiments, the amino acid sequence shares at least about 90%, at least about 94%, at least about 95%, at least about 96%, at least about 97%, at least about 98%, or at least about 99%, sequence identity, homology and/or functional equivalence with SEQ ID NO: 769. In several embodiments, the polynucleotide comprises SEQ ID NO: 770 or shares at least about 80%, at least about 85%, at least about 90%, at least about 94%, at least about 95%, at least about 96%, at least about 97%, at least about 98%, or at least about 99%, sequence identity with SEQ ID NO: 770. Optionally, the polynucleotide encodes a detectable tag (e.g., a FLAG tag) and/or can comprise an internal ribosome entry site (IRES) that allows for expression of an additional protein, such as a detectable tag (e.g., GFP). In several embodiments, a linker (e.g., a GS linker) is positioned between the LMP1 and the tag. In several embodiments, the polynucleotide encoding fLMP1 and GFP comprises SEQ ID NO: 768 or shares at least about 80%, at least about 85%, at least about 90%, at least about 94%, at least about 95%, at least about 96%, at least about 97%, at least about 98%, or at least about 99%, sequence identity with SEQ ID NO: 768. In several embodiments, the LMP1-GFP construct comprises the amino acid sequence of SEQ ID NO: 767 or an amino acid that shares at least about 80%, at least about 85%, at least about 90%, at least about 94%, at least about 95%, at least about 96%, at least about 97%, at least about 98%, or at least about 99%, sequence identity with SEQ ID NO: 767.

[0332] In several embodiments, there is provided a polynucleotide encoding a glycoprotein D (gD) of the Herpes Simplex Virus (fgD_TM). In several embodiments, the gD peptide is coupled to a CD8α signal peptide (e.g., for expression purposes, the sequence of which is provided for separately herein). In several embodiments, the gD immunoresuppressive construct comprises the amino acid sequence set forth in SEQ ID NO:1065. In several embodiments, the gD immunosuppressive construct comprises a CD8α signal peptide and the gD peptide and is encoded by a polynucleotide that encodes an amino acid sequence comprising SEQ ID NO: 773. In several embodiments, the amino acid sequence shares at least about 90%, at least about 94%, at least about 95%, at least about 96%, at least about 97%, at least about 98%, or at least about 99%, sequence identity, homology and/or functional equivalence with SEQ ID NO: 773. In several embodiments, the polynucleotide comprises SEQ ID NO: 774 or shares at least about 80%, at least about 85%, at least about 90%, at least about 94%, at least about 95%, at least about 96%, at least about 97%, at least about 98%, or at least about 99%, sequence identity with SEQ ID NO: 774. Optionally, the polynucleotide encodes a detectable tag (e.g., a FLAG tag) and/or can comprise an internal ribosome entry site (IRES) that allows for expression of an additional protein, such as a detectable tag (e.g., GFP). In several embodiments, a linker (e.g., a GS linker) is positioned between the gD and the tag. In several embodiments, the polynucleotide encoding gD and GFP comprises SEQ ID NO: 772 or shares at least about 80%, at least about 85%, at least about 90%, at least about 94%, at least about 95%, at least about 96%, at least about 97%, at least about 98%, or at least about 99%, sequence identity with SEQ ID NO: 772. In several embodiments, the gD-GFP construct comprises the amino acid sequence of SEQ ID NO: 771 or an amino acid that shares at least about 80%, at least about 85%, at least about 90%, at least about 94%, at least about 95%, at least about 96%, at least about 97%, at least about 98%, or at least about 99%, sequence identity with SEQ ID NO: 771.

[0333] In several embodiments, there is provided a polynucleotide encoding a lectin-like transcript 1 (LLT1), which, when interacting with CD161, inhibits Natural Killer cell activation and contributes to tumor cell immunosuppressive properties. In several embodiments, the LLT1 peptide is coupled to a CD8α signal peptide (e.g., for expression purposes, the sequence of which is provided for separately herein). In several embodiments, the LLT1 immunosuppressive construct comprises the amino acid sequence set forth in SEQ ID NO:1066. In several embodiments, the LLT1 immunosuppressive construct comprises a CD8α signal peptide and the LLT1 peptide and is encoded by a polynucleotide that encodes an amino acid sequence comprising SEQ ID NO: 777. In several embodiments, the amino acid sequence shares at least about 90%, at least about 94%, at least about 95%, at least about 96%, at least about 97%, at least about 98%, or at least about 99%, sequence identity, homology and/or functional equivalence with SEQ ID NO: 777. In several embodiments, the polynucleotide comprises SEQ ID NO: 778 or shares at least about 80%, at least about 85%, at least about 90%, at least about 94%, at least about 95%, at least about 96%, at least about 97%, at least about 98%, or at least about 99%, sequence identity with SEQ ID NO: 778. Optionally, the polynucleotide encodes a detectable tag (e.g., a FLAG tag) and/or can comprise an internal ribosome entry site (IRES) that allows for expression of an additional protein, such as a detectable tag (e.g., GFP). In several embodiments, a linker (e.g., a GS linker) is positioned between the LLT1 and the tag. In several embodiments, the polynucleotide encoding LLT1 and GFP comprises SEQ ID NO: 776 or shares at least about 80%, at least about 85%, at least about 90%, at least about 94%, at least about 95%, at least about 96%, at least about 97%, at least about 98%, or at least about 99%, sequence identity with SEQ ID NO: 776. In several embodiments, the LLT1-GFP construct comprises the amino acid sequence of SEQ ID NO: 775 or an amino acid that shares at least about 80%, at least about 85%, at least about 90%, at least about 94%, at least about 95%, at least about 96%, at least about 97%, at least about 98%, or at least about 99%, sequence identity with SEQ ID NO: 775.

[0334] In several embodiments, there is provided a polynucleotide encoding at least a portion of the extracellular and transmembrane domains of CD47 (CD47tm162). In several embodiments, the CD47 domains are coupled to a CD8α signal peptide (e.g., for expression purposes, the sequence of which is provided for separately herein). In several embodiments, the CD47 immunosuppressive construct comprises the amino acid sequence set forth in SEQ ID NO: 1067. In several embodiments, the CD47 immunosuppressive construct comprises a CD8α signal peptide and the CD47 extracellular and transmembrane domains (positions 19 to 162 of UniProtKB-Q08722) and is encoded by a polynucleotide that encodes an amino acid sequence comprising SEQ ID NO: 781. In several embodiments, the amino acid sequence shares at least about 90%, at least about 94%, at least about 95%, at least about 96%, at least about 97%, at least about 98%, or at least about 99%, sequence identity, homology and/or functional equivalence with SEQ ID NO: 781. In several embodiments, the polynucleotide comprises SEQ ID NO: 782 or shares at least about 80%, at least about 85%, at least about 90%, at least about 94%, at least about 95%, at least about 96%, at least about 97%, at least about 98%, or at least about 99%, sequence identity with SEQ ID NO: 782. Optionally, the polynucleotide encodes a detectable tag (e.g., a FLAG tag) and/or can comprise an internal ribosome entry site (IRES) that allows for expression of an additional protein, such as a detectable tag (e.g., GFP). In several embodiments, a linker (e.g., a GS linker) is positioned between the CD47 domains and the tag. In several embodiments, the polynucleotide encoding CD47 and GFP comprises SEQ ID NO: 780 or shares at least about 80%, at least about 85%, at least about 90%, at least about 94%, at least about 95%, at least about 96%, at least about 97%, at least about 98%, or at least about 99%, sequence identity with SEQ ID NO: 780. In several embodiments, the CD47tm162-GFP construct comprises the amino acid sequence of SEQ ID NO: 779 or an amino acid that shares at least about 80%, at least about 85%, at least about 90%, at least about 94%, at least about 95%, at least about 96%, at least about 97%, at least about 98%, or at least about 99%, sequence identity with SEQ ID NO: 779.

[0335] In several embodiments, there is provided a polynucleotide encoding at least a portion of the latent membrane protein (LMP) oncogene of the Epstein-Barr virus (LMP_L_CD8HTM). In several embodiments, the LMP domain is coupled to a CD8α signal peptide (e.g., for expression purposes, the sequence of which is provided for separately herein). In several embodiments, the LMP immunosuppressive construct comprises the amino acid sequence set forth in SEQ ID NO:1068. In several embodiments, the LMP immunosuppressive construct comprises a CD8α signal peptide, the LMP_L domain, a CD8α hinge, and a CD8α transmembrane domain and is encoded by a polynucleotide that encodes an amino acid sequence comprising SEQ ID NO: 785. In several embodiments, the amino acid sequence shares at least about 90%, at least about 94%, at least about 95%, at least about 96%, at least about 97%, at least about 98%, or at least about 99%, sequence identity, homology and/or functional equivalence with SEQ ID NO: 785. In several embodiments, the polynucleotide comprises SEQ ID NO: 786 or shares at least about 80%, at least about 85%, at least about 90%, at least about 94%, at least about 95%, at least about 96%, at least about 97%, at least about 98%, or at least about 99%, sequence identity with SEQ ID NO: 786. Optionally, the polynucleotide encodes a detectable tag (e.g., a FLAG tag) and/or can comprise an internal ribosome entry site (IRES) that allows for expression of an additional protein, such as a detectable tag (e.g., GFP). In several embodiments, a linker (e.g., a GS linker) is positioned between the CD47 domains and the tag. In several embodiments, the polynucleotide encoding the LMP_L domain and GFP comprises SEQ ID NO: 784 or shares at least about 80%, at least about 85%, at least about 90%, at least about 94%, at least about 95%, at least about 96%, at least about 97%, at least about 98%, or at least about 99%, sequence identity with SEQ ID NO: 784. In several embodiments, the LMP_L_CD8HTM-GFP construct comprises the amino acid sequence of SEQ ID NO: 783 or an amino acid that shares at least about 80%, at least about 85%, at least about 90%, at least about 94%, at least about 95%, at least about 96%, at least about 97%, at least about 98%, or at least about 99%, sequence identity with SEQ ID NO: 783.

[0336] In several embodiments, there is provided a polynucleotide encoding a synthetic immunosuppressive construct comprising a multimeric repeat (e.g., dimer, trimer, quatramer, pentamer, etc.) of a peptide with immunosuppressive properties (LALLFWLx5-CD8HTM). In several embodiments, the synthetic domain is coupled to a CD8α signal peptide (e.g., for expression purposes, the sequence of which is provided for separately herein). In several embodiments, the synthetic immunosuppressive construct comprises the amino acid sequence set forth in SEQ ID NO:1069. In several embodiments, the synthetic immunosuppressive construct comprises a CD8α signal peptide, the five repeats of the synthetic peptide, a CD8α hinge, and a CD8α transmembrane domain and is encoded by a polynucleotide that encodes an amino acid sequence comprising SEQ ID NO: 789. In several embodiments, the amino acid sequence shares at least about 90%, at least about 94%, at least about 95%, at least about 96%, at least about 97%, at least about 98%, or at least about 99%, sequence identity, homology and/or functional equivalence with SEQ ID NO: 789. In several embodiments, the polynucleotide comprises SEQ ID NO: 790 or shares at least about 80%, at least about 85%, at least about 90%, at least about 94%, at least about 95%, at least about 96%, at least about 97%, at least about 98%, or at least about 99%, sequence identity with SEQ ID NO: 790. Optionally, the polynucleotide encodes a detectable tag (e.g., a FLAG tag) and/or can comprise an internal ribosome entry site (IRES) that allows for expression of an additional protein, such as a detectable tag (e.g., GFP). In several embodiments, a linker (e.g., a GS linker) is positioned between the transmembrane domain and the tag. In several embodiments, the polynucleotide encoding the synthetic immunosuppressive peptide and GFP comprises SEQ ID NO: 788 or shares at least about 80%, at least about 85%, at least about 90%, at least about 94%, at least about 95%, at least about 96%, at least about 97%, at least about 98%, or at least about 99%, sequence identity with SEQ ID NO: 788. In several embodiments, the synthetic immunosuppressive peptide-GFP construct comprises the amino acid sequence of SEQ ID NO: 787 or an amino acid that shares at least about 80%, at least about 85%, at least about 90%, at least about 94%, at least about 95%, at least about 96%, at least about 97%, at least about 98%, or at least about 99%, sequence identity with SEQ ID NO: 787.

[0337] In several embodiments, there is provided a polynucleotide encoding at least a portion of the N-terminal fusion peptide (FP) of the human immunodeficiency virus (HIV)-1 envelope glycoprotein (Env) gp41 (GP41fp). In several embodiments, the GP41fp is coupled to a CD8α signal peptide (e.g., for expression purposes, the sequence of which is provided for separately herein). In several embodiments, the GP41fp immunosuppressive construct comprises the amino acid sequence set forth in SEQ ID NO:1070. In several embodiments, the GP41fp immunosuppressive construct comprises a CD8α signal peptide, the GP41fp peptide, and at least a portion of the GP41 transmembrane domain and is encoded by a polynucleotide that encodes an amino acid sequence comprising SEQ ID NO: 793. In several embodiments, the amino acid sequence shares at least about 90%, at least about 94%, at least about 95%, at least about 96%, at least about 97%, at least about 98%, or at least about 99%, sequence identity, homology and/or functional equivalence with SEQ ID NO: 793. In several embodiments, the polynucleotide comprises SEQ ID NO: 794 or shares at least about 80%, at least about 85%, at least about 90%, at least about 94%, at least about 95%, at least about 96%, at least about 97%, at least about 98%, or at least about 99%, sequence identity with SEQ ID NO: 794. Optionally, the polynucleotide encodes a detectable tag (e.g., a FLAG tag) and/or can comprise an internal ribosome entry site (IRES) that allows for expression of an additional protein, such as a detectable tag (e.g., GFP). In several embodiments, a linker (e.g., a GS linker) is positioned between the transmembrane domain and the tag. In several embodiments, the polynucleotide encoding the GP41fp and GFP comprises SEQ ID NO: 792 or shares at least about 80%, at least about 85%, at least about 90%, at least about 94%, at least about 95%, at least about 96%, at least about 97%, at least about 98%, or at least about 99%, sequence identity with SEQ ID NO: 792. In several embodiments, the GP41fp-GFP construct comprises the amino acid sequence of SEQ ID NO: 791 or an amino acid that shares at least about 80%, at least about 85%, at least about 90%, at least about 94%, at least about 95%, at least about 96%, at least about 97%, at least about 98%, or at least about 99%, sequence identity with SEQ ID NO: 791.

[0338] In several embodiments, there is provided a polynucleotide encoding a CKS-17 viral immunosuppressive peptide. In several embodiments, provided for is a membrane-bound CKS-17 viral immunosuppressive peptide. In several embodiments, the CKS-17 viral immunosuppressive peptide is coupled to a CD8α transmembrane protein and/or CD8α hinge domain. In several embodiments, the membrane-bound CKS-17 viral immunosuppressive peptide construct comprises one or more linker sequences. In several embodiments, the membrane-bound CKS-17 viral immunosuppressive peptide comprises a CD8α signal peptide, synthetic CKS-17, a CD8α hinge, and a CD8α transmembrane domain. In several embodiments, the membrane-bound CKS-17 viral immunosuppressive construct comprises the amino acid sequence set forth in SEQ ID NO:1071. In several embodiments, the membrane-bound CKS-17 viral immunosuppressive peptide construct is encoded by a polynucleotide that encodes an amino acid sequence comprising SEQ ID NO: 797. In several embodiments, the polynucleotide encodes a sequence that shares at least about 80%, at least about 85%, at least about 90%, at least about 94%, at least about 95%, at least about 96%, at least about 97%, at least about 98%, or at least about 99%, sequence identity, homology and/or functional equivalence with SEQ ID NO: 797. In several embodiments, the polynucleotide comprises SEQ ID NO: 798 or shares at least about 80%, at least about 85%, at least about 90%, at least about 94%, at least about 95%, at least about 96%, at least about 97%, at least about 98%, or at least about 99%, sequence identity with SEQ ID NO: 798. Optionally, the polynucleotide encodes a detectable tag (e.g., a FLAG tag) and/or can comprise an internal ribosome entry site (IRES) that allows for expression of an additional protein, such as a detectable tag (e.g., GFP). In several embodiments, the polynucleotide encoding membrane-bound synthetic CKS-17 and GFP comprises SEQ ID NO: 796 or shares at least about 80%, at least about 85%, at least about 90%, at least about 94%, at least about 95%, at least about 96%, at least about 97%, at least about 98%, or at least about 99%, sequence identity with SEQ ID NO: 796. In several embodiments, the membrane-bound synthetic CKS-17-GFP construct comprises SEQ ID NO: 795 or shares at least about 80%, at least about 85%, at least about 90%, at least about 94%, at least about 95%, at least about 96%, at least about 97%, at least about 98%, or at least about 99%, sequence identity with SEQ ID NO: 795.

[0339] In several embodiments, there is provided a polynucleotide encoding a chimeric immunosuppressive construct comprising a CKS-17 domain and an HTLV-1 (Gp21) domain. In several embodiments, provided for is a membrane-bound immunosuppressive construct comprising a CKS-17 domain and a an HTLV-1 (Gp21) domain (CKS_HTLV-8aTM). In several embodiments, the CKS_HTLV immunosuppressive peptide is coupled to a CD8α transmembrane protein and/or CD8α hinge domain. In several embodiments, the membrane-bound CKS_HTLV viral immunosuppressive peptide construct comprises one or more linker sequences. In several embodiments, the membrane-bound CKS_HTLV viral immunosuppressive peptide comprises a CD8α signal peptide, a CKS-17 peptide, an HTLV(Gp21) peptide, a CD8α hinge, and a CD8α transmembrane domain. In several embodiments, the membrane-bound CKS_HLTV immunosuppressive construct comprises the amino acid sequence set forth in SEQ ID NO:1072. In several embodiments, the membrane-bound CKS_HTLV immunosuppressive peptide construct is encoded by a polynucleotide that encodes an amino acid sequence comprising SEQ ID NO: 801. In several embodiments, the polynucleotide encodes a sequence that shares at least about 80%, at least about 85%, at least about 90%, at least about 94%, at least about 95%, at least about 96%, at least about 97%, at least about 98%, or at least about 99%, sequence identity, homology and/or functional equivalence with SEQ ID NO: 801. In several embodiments, the polynucleotide comprises SEQ ID NO: 802 or shares at least about 80%, at least about 85%, at least about 90%, at least about 94%, at least about 95%, at least about 96%, at least about 97%, at least about 98%, or at least about 99%, sequence identity with SEQ ID NO: 802. Optionally, the polynucleotide encodes a detectable tag (e.g., a FLAG tag) and/or can comprise an internal ribosome entry site (IRES) that allows for expression of an additional protein, such as a detectable tag (e.g., GFP). In several embodiments, the polynucleotide encoding membrane-bound CKS_HTLV and GFP comprises SEQ ID NO: 800 or shares at least about 80%, at least about 85%, at least about 90%, at least about 94%, at least about 95%, at least about 96%, at least about 97%, at least about 98%, or at least about 99%, sequence identity with SEQ ID NO: 800. In several embodiments, the membrane-bound CKS_HTLV-GFP construct comprises an amino acid sequence of SEQ ID NO: 799 or an amino acid that shares at least about 80%, at least about 85%, at least about 90%, at least about 94%, at least about 95%, at least about 96%, at least about 97%, at least about 98%, or at least about 99%, sequence identity with SEQ ID NO: 799.

[0340] In several embodiments, there is provided a polynucleotide encoding a chimeric immunosuppressive construct comprising a CKS-17 domain and an LMP domain. In several embodiments, provided for is a membrane-bound immunosuppressive construct comprising a CKS-17 domain and a an LMP domain (CKS_LMP-8aTM). In several embodiments, the CKS_LMP immunosuppressive peptide is coupled to a CD8α transmembrane protein and/or CD8α hinge domain. In several embodiments, the membrane-bound CKS_LMP viral immunosuppressive peptide construct comprises one or more linker sequences. In several embodiments, the membrane-bound CKS_LMP viral immunosuppressive construct comprises a CD8α signal peptide, a CKS-17 peptide, an LMP peptide, a CD8α hinge, and a CD8α transmembrane domain. In several embodiments, the membrane-bound CKS_LAMP immunosuppressive construct comprises the amino acid sequence set forth in SEQ ID NO:1073. In several embodiments, the membrane-bound CKS_LMP immunosuppressive construct is encoded by a polynucleotide that encodes an amino acid sequence comprising SEQ ID NO: 805. In several embodiments, the polynucleotide encodes a sequence that shares at least about 80%, at least about 85%, at least about 90%, at least about 94%, at least about 95%, at least about 96%, at least about 97%, at least about 98%, or at least about 99%, sequence identity, homology and/or functional equivalence with SEQ ID NO: 805. In several embodiments, the polynucleotide comprises SEQ ID NO: 806 or shares at least about 80%, at least about 85%, at least about 90%, at least about 94%, at least about 95%, at least about 96%, at least about 97%, at least about 98%, or at least about 99%, sequence identity with SEQ ID NO: 806. Optionally, the polynucleotide encodes a detectable tag (e.g., a FLAG tag) and/or can comprise an internal ribosome entry site (IRES) that allows for expression of an additional protein, such as a detectable tag (e.g., GFP). In several embodiments, the polynucleotide encoding membrane-bound CKS_LMP and GFP comprises SEQ ID NO: 804 or shares at least about 80%, at least about 85%, at least about 90%, at least about 94%, at least about 95%, at least about 96%, at least about 97%, at least about 98%, or at least about 99%, sequence identity with SEQ ID NO: 804. In several embodiments, the membrane-bound CKS_LMP-GFP construct comprises an amino acid sequence of SEQ ID NO: 803 or an amino acid that shares at least about 80%, at least about 85%, at least about 90%, at least about 94%, at least about 95%, at least about 96%, at least about 97%, at least about 98%, or at least about 99%, sequence identity with SEQ ID NO: 803.

[0341] In several embodiments, there is provided a polynucleotide encoding a chimeric immunosuppressive construct comprising a CKS-17 domain and a GP41fp domain. In several embodiments, provided for is a membrane-bound immunosuppressive construct comprising a CKS-17 domain and an GP41fp domain (CKS_GP41fptm). In several embodiments, the membrane-bound CKS_GP41fptm viral immunosuppressive peptide construct comprises one or more linker sequences. In several embodiments, the membrane-bound CKS_GP41fptm viral immunosuppressive construct comprises a CD8α signal peptide, a first portion of the GP41fp (amino acids 1-16), a CKS-17 peptide, a second portion of the GP41fp (amino acids 17-70), and a gp41 transmembrane domain. In several embodiments, the membrane-bound CKX_GP41fptm immunosuppressive construct comprises the amino acid sequence set forth in SEQ ID NO:1074 In several embodiments, the membrane-bound CKS_GP41fptm immunosuppressive construct is encoded by a polynucleotide that encodes an amino acid sequence comprising SEQ ID NO: 809. In several embodiments, the polynucleotide encodes a sequence that shares at least about 80%, at least about 85%, at least about 90%, at least about 94%, at least about 95%, at least about 96%, at least about 97%, at least about 98%, or at least about 99%, sequence identity, homology and/or functional equivalence with SEQ ID NO: 809. In several embodiments, the polynucleotide comprises SEQ ID NO: 810 or shares at least about 80%, at least about 85%, at least about 90%, at least about 94%, at least about 95%, at least about 96%, at least about 97%, at least about 98%, or at least about 99%, sequence identity with SEQ ID NO: 810. Optionally, the polynucleotide encodes a detectable tag (e.g., a FLAG tag) and/or can comprise an internal ribosome entry site (IRES) that allows for expression of an additional protein, such as a detectable tag (e.g., GFP). In several embodiments, the polynucleotide encoding membrane-bound CKS_GP41fptm and GFP comprises SEQ ID NO: 808 or shares at least about 80%, at least about 85%, at least about 90%, at least about 94%, at least about 95%, at least about 96%, at least about 97%, at least about 98%, or at least about 99%, sequence identity with SEQ ID NO: 808. In several embodiments, the membrane-bound CKS_GP41fptm-GFP construct comprises an amino acid sequence of SEQ ID NO: 807 or an amino acid that shares at least about 80%, at least about 85%, at least about 90%, at least about 94%, at least about 95%, at least about 96%, at least about 97%, at least about 98%, or at least about 99%, sequence identity with SEQ ID NO: 807.

[0342] In several embodiments, there is provided a polynucleotide encoding a truncated portion of the latent membrane protein 1 (LMP1) peptide of the Epstein-Barr Virus (LMP_S). In several embodiments, the LMP_S peptide is coupled to a CD8α signal peptide (e.g., for expression purposes, the sequence of which is provided for separately herein). In several embodiments, provided for is a membrane-bound LMP_S immunosuppressive construct comprising an LMP_S peptide coupled to a CD8α transmembrane protein and/or CD8α hinge domain. In several embodiments, the membrane-bound LMP_S immunosuppressive construct comprises one or more linker sequences. In several embodiments, the membrane-bound LMP_S immunosuppressive construct comprises the amino acid sequence set forth in SEQ ID NO:1075. In several embodiments, the membrane-bound LMP_S immunosuppressive construct comprises a CD8α signal peptide, an LMP_S peptide, an HTLV(Gp21) peptide, a CD8α hinge, and a CD8α transmembrane domain and is encoded by a polynucleotide that encodes an amino acid sequence comprising SEQ ID NO: 813. In several embodiments, the amino acid sequence shares at least about 90%, at least about 94%, at least about 95%, at least about 96%, at least about 97%, at least about 98%, or at least about 99%, sequence identity, homology and/or functional equivalence with SEQ ID NO: 813. In several embodiments, the polynucleotide comprises SEQ ID NO: 814 or shares at least about 80%, at least about 85%, at least about 90%, at least about 94%, at least about 95%, at least about 96%, at least about 97%, at least about 98%, or at least about 99%, sequence identity with SEQ ID NO: 814. Optionally, the polynucleotide encodes a detectable tag (e.g., a FLAG tag) and/or can comprise an internal ribosome entry site (IRES) that allows for expression of an additional protein, such as a detectable tag (e.g., GFP). In several embodiments, a linker (e.g., a GS linker) is positioned between the LMP_S and the tag. In several embodiments, the polynucleotide encoding LMP_S and GFP comprises SEQ ID NO: 812 or shares at least about 80%, at least about 85%, at least about 90%, at least about 94%, at least about 95%, at least about 96%, at least about 97%, at least about 98%, or at least about 99%, sequence identity with SEQ ID NO: 812. In several embodiments, the LMP_S-GFP construct comprises the amino acid sequence of SEQ ID NO: 811 or an amino acid that shares at least about 80%, at least about 85%, at least about 90%, at least about 94%, at least about 95%, at least about 96%, at least about 97%, at least about 98%, or at least about 99%, sequence identity with SEQ ID NO: 811.

[0343] In several embodiments, there is provided a polynucleotide encoding a chimeric immunosuppressive construct comprising at least a portion of the latent membrane protein 1 (LMP1) peptide of the Epstein-Barr Virus (LMP_L) coupled with at least a portion of the extracellular and transmembrane domains of CD47 (CD47tm162), together referred to as LMP_CD47tm162. In several embodiments, the LMP_CD47tm162 is coupled to a CD8α signal peptide (e.g., for expression purposes, the sequence of which is provided for separately herein). In several embodiments, the LMP_CD47tm162 construct is membrane-bound based on the portion of the CD47 transmembrane domain and comprises one or more linker sequences. In several embodiments, the membrane-bound LMP_CD47tm162 immunosuppressive construct comprises the amino acid sequence set forth in SEQ ID NO:1076. In several embodiments, the membrane-bound LMP_CD47tm162 immunosuppressive construct comprises a CD8α signal peptide, an LMP_L peptide, and a CD47tm162 peptide, and is encoded by a polynucleotide that encodes an amino acid sequence comprising SEQ ID NO: 817. In several embodiments, the amino acid sequence shares at least about 90%, at least about 94%, at least about 95%, at least about 96%, at least about 97%, at least about 98%, or at least about 99%, sequence identity, homology and/or functional equivalence with SEQ ID NO: 817. In several embodiments, the polynucleotide comprises SEQ ID NO: 818 or shares at least about 80%, at least about 85%, at least about 90%, at least about 94%, at least about 95%, at least about 96%, at least about 97%, at least about 98%, or at least about 99%, sequence identity with SEQ ID NO: 818. Optionally, the polynucleotide encodes a detectable tag (e.g., a FLAG tag) and/or can comprise an internal ribosome entry site (IRES) that allows for expression of an additional protein, such as a detectable tag (e.g., GFP). In several embodiments, a linker (e.g., a GS linker) is positioned between the LMP_CD47tm162 and the tag. In several embodiments, the polynucleotide encoding LMP_CD47tm162 and GFP comprises SEQ ID NO: 816 or shares at least about 80%, at least about 85%, at least about 90%, at least about 94%, at least about 95%, at least about 96%, at least about 97%, at least about 98%, or at least about 99%, sequence identity with SEQ ID NO: 816. In several embodiments, the LMP_CD47tm162-GFP construct comprises the amino acid sequence of SEQ ID NO: 815 or an amino acid that shares at least about 80%, at least about 85%, at least about 90%, at least about 94%, at least about 95%, at least about 96%, at least about 97%, at least about 98%, or at least about 99%, sequence identity with SEQ ID NO: 815.

[0344] In several embodiments, there is provided a polynucleotide encoding a chimeric immunosuppressive construct comprising at least a portion of a p15E viral peptide coupled with at least a portion of the extracellular and transmembrane domains of CD47 (CD47tm162), together referred to as p15E_CD47tm162. In several embodiments, the p15E_CD47tm162 is coupled to a CD8α signal peptide (e.g., for expression purposes, the sequence of which is provided for separately herein). In several embodiments, the p15E_CD47tm162 construct is membrane-bound based on the portion of the CD47 transmembrane domain and comprises one or more linker sequences. In several embodiments, the membrane-bound p15E_CD47tm162 immunosuppressive construct comprises the amino acid sequence set forth in SEQ ID NO:1077. In several embodiments, the membrane-bound p15E_CD47tm162 immunosuppressive construct comprises a CD8α signal peptide, a p15E peptide, and a CD47tm162 peptide, and is encoded by a polynucleotide that encodes an amino acid sequence comprising SEQ ID NO: 821. In several embodiments, the amino acid sequence shares at least about 90%, at least about 94%, at least about 95%, at least about 96%, at least about 97%, at least about 98%, or at least about 99%, sequence identity, homology and/or functional equivalence with SEQ ID NO: 821. In several embodiments, the polynucleotide comprises SEQ ID NO: 822 or shares at least about 80%, at least about 85%, at least about 90%, at least about 94%, at least about 95%, at least about 96%, at least about 97%, at least about 98%, or at least about 99%, sequence identity with SEQ ID NO: 822. Optionally, the polynucleotide encodes a detectable tag (e.g., a FLAG tag) and/or can comprise an internal ribosome entry site (IRES) that allows for expression of an additional protein, such as a detectable tag (e.g., GFP). In several embodiments, a linker (e.g., a GS linker) is positioned between the p15E_CD47tm162 and the tag. In several embodiments, the polynucleotide encoding p15E_CD47tm162 and GFP comprises SEQ ID NO: 820 or shares at least about 80%, at least about 85%, at least about 90%, at least about 94%, at least about 95%, at least about 96%, at least about 97%, at least about 98%, or at least about 99%, sequence identity with SEQ ID NO: 820. In several embodiments, the p15E_CD47tm162-GFP construct comprises the amino acid sequence of SEQ ID NO: 819 or an amino acid that shares at least about 80%, at least about 85%, at least about 90%, at least about 94%, at least about 95%, at least about 96%, at least about 97%, at least about 98%, or at least about 99%, sequence identity with SEQ ID NO: 819.

[0345] In several embodiments, there is provided a polynucleotide encoding a chimeric immunosuppressive construct comprising at least one domain derived from HIV Gp41 and at least one domain from CD47 (CD47_GP41fptm). In several embodiments, the CD47_GP41fptm is coupled to a CD8α signal peptide (e.g., for expression purposes, the sequence of which is provided for separately herein). In several embodiments, the CD47_GP41fptm construct is membrane-bound based on a gp41 transmembrane domain. In several embodiments, the membrane-bound CD47_GP41fptm immunosuppressive construct comprises the amino acid sequence set forth in SEQ ID NO:1078. In several embodiments, the membrane-bound CD47_GP41fptm immunosuppressive construct comprises a CD8α signal peptide, a first GP41 domain (amino acids 1-16 of the extracellular domain), a CD47 domain (amino acids 2-141), a second GP41 domain (amino acids 17-70 of the extracellular domain), and a GP41 transmembrane domain and is encoded by a polynucleotide that encodes an amino acid sequence comprising SEQ ID NO: 825. In several embodiments, the amino acid sequence shares at least about 90%, at least about 94%, at least about 95%, at least about 96%, at least about 97%, at least about 98%, or at least about 99%, sequence identity, homology and/or functional equivalence with SEQ ID NO: 825. In several embodiments, the polynucleotide comprises SEQ ID NO: 826 or shares at least about 80%, at least about 85%, at least about 90%, at least about 94%, at least about 95%, at least about 96%, at least about 97%, at least about 98%, or at least about 99%, sequence identity with SEQ ID NO: 826. Optionally, the polynucleotide encodes a detectable tag (e.g., a FLAG tag) and/or can comprise an internal ribosome entry site (IRES) that allows for expression of an additional protein, such as a detectable tag (e.g., GFP). In several embodiments, a linker (e.g., a GS linker) is positioned between the CD47_GP41fptm and the tag. In several embodiments, the polynucleotide encoding CD47_GP41fptm and GFP comprises SEQ ID NO: 824 or shares at least about 80%, at least about 85%, at least about 90%, at least about 94%, at least about 95%, at least about 96%, at least about 97%, at least about 98%, or at least about 99%, sequence identity with SEQ ID NO: 824. In several embodiments, the CD47_GP41fptm-GFP construct comprises the amino acid sequence of SEQ ID NO: 823 or an amino acid that shares at least about 80%, at least about 85%, at least about 90%, at least about 94%, at least about 95%, at least about 96%, at least about 97%, at least about 98%, or at least about 99%, sequence identity with SEQ ID NO: 823.

[0346] In several embodiments, there is provided a polynucleotide encoding an immunosuppressive construct comprising at least a portion of an antibody that targets a signal-regulatory protein α (SIRPα) (anti-SIRPa agonist_vHL), which is an innate immune checkpoint expressed on dendritic cells, macrophages, monocytes and neutrophils. In several embodiments, the constructs are engineered to be membrane-bound. In several embodiments, the anti-SIRPa agonist_vHL is coupled to a CD8α signal peptide (e.g., for expression purposes, the sequence of which is provided for separately herein). In several embodiments, the anti-SIRPa agonist_vHL construct is membrane-bound based on a CD8α hinge region and/or a CD8α transmembrane domain. In several embodiments, the membrane-bound anti-SIRPa agonist_vHL immunosuppressive construct comprises the amino acid sequence set forth in SEQ ID NO:1079 In several embodiments, the membrane-bound anti-SIRPa agonist_vHL immunosuppressive construct comprises a CD8α signal peptide, an anti-SIRPa heavy chain, a linker and anti-SIRPα light chain, a CD8α hinge region and, a CD8α transmembrane domain and is encoded by a polynucleotide that encodes an amino acid sequence comprising SEQ ID NO: 833. In several embodiments, the amino acid sequence shares at least about 90%, at least about 94%, at least about 95%, at least about 96%, at least about 97%, at least about 98%, or at least about 99%, sequence identity, homology and/or functional equivalence with SEQ ID NO: 833. In several embodiments, the polynucleotide comprises SEQ ID NO: 834 or shares at least about 80%, at least about 85%, at least about 90%, at least about 94%, at least about 95%, at least about 96%, at least about 97%, at least about 98%, or at least about 99%, sequence identity with SEQ ID NO: 834. Optionally, the polynucleotide encodes a detectable tag (e.g., a FLAG tag) and/or can comprise an internal ribosome entry site (IRES) that allows for expression of an additional protein, such as a detectable tag (e.g., GFP). In several embodiments, a linker (e.g., a GS linker) is positioned between the anti-SIRPa agonist_vHL and the tag. In several embodiments, the polynucleotide encoding anti-SIRPa agonist_vHL and GFP comprises SEQ ID NO: 832 or shares at least about 80%, at least about 85%, at least about 90%, at least about 94%, at least about 95%, at least about 96%, at least about 97%, at least about 98%, or at least about 99%, sequence identity with SEQ ID NO: 832. In several embodiments, the anti-SIRPa agonist_vHL-GFP construct comprises the amino acid sequence of SEQ ID NO: 831 or an amino acid that shares at least about 80%, at least about 85%, at least about 90%, at least about 94%, at least about 95%, at least about 96%, at least about 97%, at least about 98%, or at least about 99%, sequence identity with SEQ ID NO: 831.

[0347] In several embodiments, there is provided a polynucleotide encoding an immunosuppressive construct comprising at least one domain derived from HTLV GP21 (HTLV1_GP21). In several embodiments, the HTLV1_GP21 is coupled to a CD8α signal peptide (e.g., for expression purposes, the sequence of which is provided for separately herein). In several embodiments, the HTLV_GP21 immunosuppressive construct comprises the amino acid sequence set forth in SEQ ID NO:1080. In several embodiments, the HTLV1_GP21 comprises a CD8α signal peptide and a GP21 transmembrane domain and is encoded by a polynucleotide that encodes an amino acid sequence comprising SEQ ID NO: 841. In several embodiments, the amino acid sequence shares at least about 90%, at least about 94%, at least about 95%, at least about 96%, at least about 97%, at least about 98%, or at least about 99%, sequence identity, homology and/or functional equivalence with SEQ ID NO: 841. In several embodiments, the polynucleotide comprises SEQ ID NO: 842 or shares at least about 80%, at least about 85%, at least about 90%, at least about 94%, at least about 95%, at least about 96%, at least about 97%, at least about 98%, or at least about 99%, sequence identity with SEQ ID NO: 842. Optionally, the polynucleotide encodes a detectable tag (e.g., a FLAG tag) and/or can comprise an internal ribosome entry site (IRES) that allows for expression of an additional protein, such as a detectable tag (e.g., GFP). In several embodiments, a linker (e.g., a GS linker) is positioned between the HTLV1_GP21 and the tag. In several embodiments, the polynucleotide encoding HTLV1_GP21 and GFP comprises SEQ ID NO: 840 or shares at least about 80%, at least about 85%, at least about 90%, at least about 94%, at least about 95%, at least about 96%, at least about 97%, at least about 98%, or at least about 99%, sequence identity with SEQ ID NO: 840. In several embodiments, the HTLV1_fGP62-GFP construct comprises the amino acid sequence of SEQ ID NO: 839 or an amino acid that shares at least about 80%, at least about 85%, at least about 90%, at least about 94%, at least about 95%, at least about 96%, at least about 97%, at least about 98%, or at least about 99%, sequence identity with SEQ ID NO: 839.

[0348] In several embodiments, there is provided a polynucleotide encoding an immunosuppressive construct comprising at least one domain derived from a Lassa virus membrane glycoprotein 2 (LASV_fGP2). In several embodiments, the LASV_fGP2 immunosuppressive construct comprises the amino acid sequence set forth in SEQ ID NO:1081. In several embodiments, the LASV_fGP2 is coupled to a CD8α signal peptide (e.g., for expression purposes, the sequence of which is provided for separately herein). In several embodiments, the LASV_fGP2 comprises a CD8α signal peptide and at least a portion of a Lassa Virus GP2 domain, including a transmembrane region and is encoded by a polynucleotide that encodes an amino acid sequence comprising SEQ ID NO: 845. In several embodiments, the amino acid sequence shares at least about 90%, at least about 94%, at least about 95%, at least about 96%, at least about 97%, at least about 98%, or at least about 99%, sequence identity, homology and/or functional equivalence with SEQ ID NO: 845. In several embodiments, the polynucleotide comprises SEQ ID NO: 846 or shares at least about 80%, at least about 85%, at least about 90%, at least about 94%, at least about 95%, at least about 96%, at least about 97%, at least about 98%, or at least about 99%, sequence identity with SEQ ID NO: 846. Optionally, the polynucleotide encodes a detectable tag (e.g., a FLAG tag) and/or can comprise an internal ribosome entry site (IRES) that allows for expression of an additional protein, such as a detectable tag (e.g., GFP). In several embodiments, a linker (e.g., a GS linker) is positioned between the HTLV1_GP21 and the tag. In several embodiments, the polynucleotide encoding LASV_fGP2 and GFP comprises SEQ ID NO: 844 or shares at least about 80%, at least about 85%, at least about 90%, at least about 94%, at least about 95%, at least about 96%, at least about 97%, at least about 98%, or at least about 99%, sequence identity with SEQ ID NO: 844. In several embodiments, the LASV_fGP2-GFP construct comprises the amino acid sequence of SEQ ID NO: 843 or an amino acid that shares at least about 80%, at least about 85%, at least about 90%, at least about 94%, at least about 95%, at least about 96%, at least about 97%, at least about 98%, or at least about 99%, sequence identity with SEQ ID NO: 843.

[0349] In several embodiments, there is provided a polynucleotide encoding an immunosuppressive construct comprising at least one domain derived from a Sudan ebolavirus envelope glycoprotein (SEBOV_fGP). In several embodiments, the SEBOV_fGP is coupled to a CD8α signal peptide (e.g., for expression purposes, the sequence of which is provided for separately herein). In several embodiments, the SEBOV_fGP comprises a CD8α signal peptide and at least two domains from the ebolavirus envelope. In several embodiments, the SEBOV_fGP comprises a full GP1 glycoprotein sequence followed by a truncated form of GP1 (known as GP2, resulting from proteolysis of the GP1 domain). In several embodiments, the SEBOV_fGP immunosuppressive construct comprises the amino acid sequence set forth in SEQ ID NO:1082. In several embodiments, the GP2 domain includes a transmembrane domain. In several embodiments, the SEBOV_fGP is encoded by a polynucleotide that encodes an amino acid sequence comprising SEQ ID NO: 849. In several embodiments, the amino acid sequence shares at least about 90%, at least about 94%, at least about 95%, at least about 96%, at least about 97%, at least about 98%, or at least about 99%, sequence identity, homology and/or functional equivalence with SEQ ID NO: 849. In several embodiments, the polynucleotide comprises SEQ ID NO: 850 or shares at least about 80%, at least about 85%, at least about 90%, at least about 94%, at least about 95%, at least about 96%, at least about 97%, at least about 98%, or at least about 99%, sequence identity with SEQ ID NO: 850. Optionally, the polynucleotide encodes a detectable tag (e.g., a FLAG tag) and/or can comprise an internal ribosome entry site (IRES) that allows for expression of an additional protein, such as a detectable tag (e.g., GFP). In several embodiments, a linker (e.g., a GS linker) is positioned between the SEBOV_fGP and the tag. In several embodiments, the polynucleotide encoding SEBOV_fGP and GFP comprises SEQ ID NO: 848 or shares at least about 80%, at least about 85%, at least about 90%, at least about 94%, at least about 95%, at least about 96%, at least about 97%, at least about 98%, or at least about 99%, sequence identity with SEQ ID NO: 848. In several embodiments, the SEBOV_fGP-GFP construct comprises the amino acid sequence of SEQ ID NO: 847 or an amino acid that shares at least about 80%, at least about 85%, at least about 90%, at least about 94%, at least about 95%, at least about 96%, at least about 97%, at least about 98%, or at least about 99%, sequence identity with SEQ ID NO: 847.

[0350] In several embodiments, there is provided a polynucleotide encoding an immunosuppressive construct comprising at least one domain derived from a Sudan ebolavirus envelope glycoprotein (SEBOV_GP2). In several embodiments, the SEBOV_GP2 is coupled to a CD8α signal peptide (e.g., for expression purposes, the sequence of which is provided for separately herein). In several embodiments, the SEBOV_GP2 comprises a CD8α signal peptide and a GP2 domain, resulting from proteolysis of the GP1 domain. In several embodiments, the GP2 domain includes a transmembrane domain. In several embodiments, the SEBOV_GP2 immunosuppressive construct comprises the amino acid sequence set forth in SEQ ID NO:1083. In several embodiments, the SEBOV_GP2 is encoded by a polynucleotide that encodes an amino acid sequence comprising SEQ ID NO: 853. In several embodiments, the amino acid sequence shares at least about 90%, at least about 94%, at least about 95%, at least about 96%, at least about 97%, at least about 98%, or at least about 99%, sequence identity, homology and/or functional equivalence with SEQ ID NO: 853. In several embodiments, the polynucleotide comprises SEQ ID NO: 854 or shares at least about 80%, at least about 85%, at least about 90%, at least about 94%, at least about 95%, at least about 96%, at least about 97%, at least about 98%, or at least about 99%, sequence identity with SEQ ID NO: 854. Optionally, the polynucleotide encodes a detectable tag (e.g., a FLAG tag) and/or can comprise an internal ribosome entry site (IRES) that allows for expression of an additional protein, such as a detectable tag (e.g., GFP). In several embodiments, a linker (e.g., a GS linker) is positioned between the SEBOV_GP2 and the tag. In several embodiments, the polynucleotide encoding SEBOV_GP2 and GFP comprises SEQ ID NO: 852 or shares at least about 80%, at least about 85%, at least about 90%, at least about 94%, at least about 95%, at least about 96%, at least about 97%, at least about 98%, or at least about 99%, sequence identity with SEQ ID NO: 852. In several embodiments, the SEBOV_GP2-GFP construct comprises the amino acid sequence of SEQ ID NO: 851 or an amino acid that shares at least about 80%, at least about 85%, at least about 90%, at least about 94%, at least about 95%, at least about 96%, at least about 97%, at least about 98%, or at least about 99%, sequence identity with SEQ ID NO: 851.

[0351] In several embodiments, there is provided a polynucleotide encoding an immunosuppressive construct comprising at least one domain derived from a Sars-CoV-2 spike protein (SCoV_S2). In several embodiments, the SCoV_S2 is coupled to a CD8α signal peptide (e.g., for expression purposes, the sequence of which is provided for separately herein). In several embodiments, the SCoV_S2 comprises a CD8α signal peptide and a an S2 spike protein, including a transmembrane domain. In several embodiments, the SDCoV_S2 immunosuppressive construct comprises the amino acid sequence set forth in SEQ ID NO:1084. In several embodiments, the SCoV_S2 is encoded by a polynucleotide that encodes an amino acid sequence comprising SEQ ID NO: 857. In several embodiments, the amino acid sequence shares at least about 90%, at least about 94%, at least about 95%, at least about 96%, at least about 97%, at least about 98%, or at least about 99%, sequence identity, homology and/or functional equivalence with SEQ ID NO: 857. In several embodiments, the polynucleotide comprises SEQ ID NO: 858 or shares at least about 80%, at least about 85%, at least about 90%, at least about 94%, at least about 95%, at least about 96%, at least about 97%, at least about 98%, or at least about 99%, sequence identity with SEQ ID NO: 858. Optionally, the polynucleotide encodes a detectable tag (e.g., a FLAG tag) and/or can comprise an internal ribosome entry site (IRES) that allows for expression of an additional protein, such as a detectable tag (e.g., GFP). In several embodiments, a linker (e.g., a GS linker) is positioned between the SCoV_S2 and the tag. In several embodiments, the polynucleotide encoding SCoV_S2 and GFP comprises SEQ ID NO: 856 or shares at least about 80%, at least about 85%, at least about 90%, at least about 94%, at least about 95%, at least about 96%, at least about 97%, at least about 98%, or at least about 99%, sequence identity with SEQ ID NO: 856. In several embodiments, the SCoV_S2-GFP construct comprises the amino acid sequence of SEQ ID NO: 855 or an amino acid that shares at least about 80%, at least about 85%, at least about 90%, at least about 94%, at least about 95%, at least about 96%, at least about 97%, at least about 98%, or at least about 99%, sequence identity with SEQ ID NO: 855.

[0352] In several embodiments, there is provided a polynucleotide encoding an immunosuppressive construct comprising at least a portion of a Galectin-3-binding protein (LGALS3BP). In several embodiments, the constructs are engineered to be membrane-bound. In several embodiments, the LGALS3BP is coupled to a CD8α signal peptide (e.g., for expression purposes, the sequence of which is provided for separately herein). In several embodiments, LGALS3BP construct is membrane-bound based on a CD8α hinge region and/or a CD8α transmembrane domain. In several embodiments, the LGALS3BP immunosuppressive construct comprises the amino acid sequence set forth in SEQ ID NO:1085 In several embodiments, the membrane-bound LGALS3BP immunosuppressive construct comprises a CD8α signal peptide, a Galectin 3 binding protein, and a CD8α transmembrane domain and is encoded by a polynucleotide that encodes an amino acid sequence comprising SEQ ID NO: 861. In several embodiments, the amino acid sequence shares at least about 90%, at least about 94%, at least about 95%, at least about 96%, at least about 97%, at least about 98%, or at least about 99%, sequence identity, homology and/or functional equivalence with SEQ ID NO: 861. In several embodiments, the polynucleotide comprises SEQ ID NO: 862 or shares at least about 80%, at least about 85%, at least about 90%, at least about 94%, at least about 95%, at least about 96%, at least about 97%, at least about 98%, or at least about 99%, sequence identity with SEQ ID NO: 862. Optionally, the polynucleotide encodes a detectable tag (e.g., a FLAG tag) and/or can comprise an internal ribosome entry site (IRES) that allows for expression of an additional protein, such as a detectable tag (e.g., GFP). In several embodiments, a linker (e.g., a GS linker) is positioned between the LGALS3BP and the tag. In several embodiments, the polynucleotide encoding LGALS3BP and GFP comprises SEQ ID NO: 860 or shares at least about 80%, at least about 85%, at least about 90%, at least about 94%, at least about 95%, at least about 96%, at least about 97%, at least about 98%, or at least about 99%, sequence identity with SEQ ID NO: 860. In several embodiments, the LGALS3BP-GFP construct comprises the amino acid sequence of SEQ ID NO: 859 or an amino acid that shares at least about 80%, at least about 85%, at least about 90%, at least about 94%, at least about 95%, at least about 96%, at least about 97%, at least about 98%, or at least about 99%, sequence identity with SEQ ID NO: 859.

[0353] In several embodiments, there is provided a polynucleotide encoding an immunosuppressive construct comprising at least a portion of CD24. In several embodiments, the constructs are engineered to be membrane-bound. In several embodiments, the CD24 immunosuppressive construct comprises the amino acid sequence set forth in SEQ ID NO:1086. In several embodiments, the CD24 construct comprises a CD24 signal peptide and a CD24 protein and is encoded by a polynucleotide that encodes an amino acid sequence comprising SEQ ID NO: 865. In several embodiments, the amino acid sequence shares at least about 90%, at least about 94%, at least about 95%, at least about 96%, at least about 97%, at least about 98%, or at least about 99%, sequence identity, homology and/or functional equivalence with SEQ ID NO: 865. In several embodiments, the polynucleotide comprises SEQ ID NO: 866 or shares at least about 80%, at least about 85%, at least about 90%, at least about 94%, at least about 95%, at least about 96%, at least about 97%, at least about 98%, or at least about 99%, sequence identity with SEQ ID NO: 866. Optionally, the polynucleotide encodes a detectable tag (e.g., a FLAG tag) and/or can comprise an internal ribosome entry site (IRES) that allows for expression of an additional protein, such as a detectable tag (e.g., GFP). In several embodiments, a T2A domain is positioned between the CD24 and the tag. In several embodiments, the polynucleotide encoding CD24 and GFP comprises SEQ ID NO: 864 or shares at least about 80%, at least about 85%, at least about 90%, at least about 94%, at least about 95%, at least about 96%, at least about 97%, at least about 98%, or at least about 99%, sequence identity with SEQ ID NO: 864. In several embodiments, the CD24-GFP construct comprises the amino acid sequence of SEQ ID NO: 863 or an amino acid that shares at least about 80%, at least about 85%, at least about 90%, at least about 94%, at least about 95%, at least about 96%, at least about 97%, at least about 98%, or at least about 99%, sequence identity with SEQ ID NO: 863.

[0354] In several embodiments, there is provided a polynucleotide encoding an immunosuppressive construct comprising at least a portion of a Hepatitis C envelope glycoprotein (HCV_E2). In several embodiments, the HCV_E2 immunosuppressive construct comprises the amino acid sequence set forth in SEQ ID NO:1087. In several embodiments, the HCV_E2 is coupled to a CD8α signal peptide (e.g., for expression purposes, the sequence of which is provided for separately herein). In several embodiments, the HCV_E2 immunosuppressive construct comprises a CD8α signal peptide, and a E2 protein of HCV and is encoded by a polynucleotide that encodes an amino acid sequence comprising SEQ ID NO: 869. In several embodiments, the amino acid sequence shares at least about 90%, at least about 94%, at least about 95%, at least about 96%, at least about 97%, at least about 98%, or at least about 99%, sequence identity, homology and/or functional equivalence with SEQ ID NO: 869. In several embodiments, the polynucleotide comprises SEQ ID NO: 870 or shares at least about 80%, at least about 85%, at least about 90%, at least about 94%, at least about 95%, at least about 96%, at least about 97%, at least about 98%, or at least about 99%, sequence identity with SEQ ID NO: 870. Optionally, the polynucleotide encodes a detectable tag (e.g., a FLAG tag) and/or can comprise an internal ribosome entry site (IRES) that allows for expression of an additional protein, such as a detectable tag (e.g., GFP). In several embodiments, a linker (e.g., a GS linker) is positioned between the HCV_E2 and the tag. In several embodiments, the polynucleotide encoding HCV_E2 and GFP comprises SEQ ID NO: 868 or shares at least about 80%, at least about 85%, at least about 90%, at least about 94%, at least about 95%, at least about 96%, at least about 97%, at least about 98%, or at least about 99%, sequence identity with SEQ ID NO: 868. In several embodiments, the HCV_E2-GFP construct comprises the amino acid sequence of SEQ ID NO: 867 or an amino acid that shares at least about 80%, at least about 85%, at least about 90%, at least about 94%, at least about 95%, at least about 96%, at least about 97%, at least about 98%, or at least about 99%, sequence identity with SEQ ID NO: 867.

[0355] In several embodiments, there is provided a polynucleotide encoding an immunosuppressive construct comprising at least a portion of an antibody that targets a signal-regulatory protein α (SIRPα) (anti-SIRPa agonist_vLH). In several embodiments, the constructs are engineered to be membrane-bound. In several embodiments, the anti-SIRPa agonist_vLH is coupled to a CD8α signal peptide (e.g., for expression purposes, the sequence of which is provided for separately herein). In several embodiments, the anti-SIRPa agonist_vLH construct is membrane-bound based on a CD8α hinge region and/or a CD8α transmembrane domain. In several embodiments, the membrane-bound anti-SIRPa agonist_vLH immunosuppressive construct comprises the amino acid sequence set forth in SEQ ID NO:1088. In several embodiments, the membrane-bound anti-SIRPa agonist_vLH immunosuppressive construct comprises a CD8α signal peptide, an anti-SIRPα light chain, a linker, anti-SIRPα heavy chain, a CD8α hinge region and, a CD8α transmembrane domain and is encoded by a polynucleotide that encodes an amino acid sequence comprising SEQ ID NO: 873. In several embodiments, the amino acid sequence shares at least about 90%, at least about 94%, at least about 95%, at least about 96%, at least about 97%, at least about 98%, or at least about 99%, sequence identity, homology and/or functional equivalence with SEQ ID NO: 873. In several embodiments, the polynucleotide comprises SEQ ID NO: 874 or shares at least about 80%, at least about 85%, at least about 90%, at least about 94%, at least about 95%, at least about 96%, at least about 97%, at least about 98%, or at least about 99%, sequence identity with SEQ ID NO: 874. Optionally, the polynucleotide encodes a detectable tag (e.g., a FLAG tag) and/or can comprise an internal ribosome entry site (IRES) that allows for expression of an additional protein, such as a detectable tag (e.g., GFP). In several embodiments, a linker (e.g., a GS linker) is positioned between the anti-SIRPa agonist_vLH and the tag. In several embodiments, the polynucleotide encoding anti-SIRPa agonist_vLH and GFP comprises SEQ ID NO: 872 or shares at least about 80%, at least about 85%, at least about 90%, at least about 94%, at least about 95%, at least about 96%, at least about 97%, at least about 98%, or at least about 99%, sequence identity with SEQ ID NO: 872. In several embodiments, the anti-SIRPa agonist_vLH-GFP construct comprises the amino acid sequence of SEQ ID NO: 871 or an amino acid that shares at least about 80%, at least about 85%, at least about 90%, at least about 94%, at least about 95%, at least about 96%, at least about 97%, at least about 98%, or at least about 99%, sequence identity with SEQ ID NO: 871.

[0356] In several embodiments, there is provided a polynucleotide encoding an immunosuppressive construct comprising at least CEA Cell Adhesion Molecule 1-derived domain (CEACAM1). In several embodiments, the constructs are engineered to be membrane-bound. In several embodiments, the CEACAM1 is coupled to a CD8α signal peptide (e.g., for expression purposes, the sequence of which is provided for separately herein). In several embodiments, the CEACAM1 immunosuppressive construct comprises a CD8α signal peptide and a CEACAM1-derived protein. In several embodiments, the CEACAM1 immunosuppressive construct comprises the amino acid sequence set forth in SEQ ID NO:1089. In several embodiments, the CEACAM1 immunosuppressive construct is encoded by a polynucleotide that encodes an amino acid sequence comprising SEQ ID NO: 877. In several embodiments, the amino acid sequence shares at least about 90%, at least about 94%, at least about 95%, at least about 96%, at least about 97%, at least about 98%, or at least about 99%, sequence identity, homology and/or functional equivalence with SEQ ID NO: 877. In several embodiments, the polynucleotide comprises SEQ ID NO: 878 or shares at least about 80%, at least about 85%, at least about 90%, at least about 94%, at least about 95%, at least about 96%, at least about 97%, at least about 98%, or at least about 99%, sequence identity with SEQ ID NO: 878. Optionally, the polynucleotide encodes a detectable tag (e.g., a FLAG tag) and/or can comprise an internal ribosome entry site (IRES) that allows for expression of an additional protein, such as a detectable tag (e.g., GFP). In several embodiments, a linker (e.g., a GS linker) is positioned between the CEACAM1 and the tag. In several embodiments, the polynucleotide encoding the CEACAM1 and GFP comprises SEQ ID NO: 876 or shares at least about 80%, at least about 85%, at least about 90%, at least about 94%, at least about 95%, at least about 96%, at least about 97%, at least about 98%, or at least about 99%, sequence identity with SEQ ID NO: 876. In several embodiments, the CEACAM1-GFP construct comprises the amino acid sequence of SEQ ID NO: 875 or an amino acid that shares at least about 80%, at least about 85%, at least about 90%, at least about 94%, at least about 95%, at least about 96%, at least about 97%, at least about 98%, or at least about 99%, sequence identity with SEQ ID NO: 875.

[0357] In several embodiments, there is provided a polynucleotide encoding an immunosuppressive construct comprising CD155 transmembrane domain (CD155tm_3M). In several embodiments, the CD155tm_3M is coupled to a CD8α signal peptide (e.g., for expression purposes, the sequence of which is provided for separately herein). In several embodiments, the CD155tm_3M immunosuppressive construct comprises a CD8α signal peptide and a CD155-derived protein. In several embodiments, the CD155tm_3M immunosuppressive construct comprises the amino acid sequence set forth in SEQ ID NO:1090. In several embodiments, the CD155tm_3M immunosuppressive construct is encoded by a polynucleotide that encodes an amino acid sequence comprising SEQ ID NO: 881. In several embodiments, the amino acid sequence shares at least about 90%, at least about 94%, at least about 95%, at least about 96%, at least about 97%, at least about 98%, or at least about 99%, sequence identity, homology and/or functional equivalence with SEQ ID NO: 881. In several embodiments, the polynucleotide comprises SEQ ID NO: 882 or shares at least about 80%, at least about 85%, at least about 90%, at least about 94%, at least about 95%, at least about 96%, at least about 97%, at least about 98%, or at least about 99%, sequence identity with SEQ ID NO: 882. Optionally, the polynucleotide encodes a detectable tag (e.g., a FLAG tag) and/or can comprise an internal ribosome entry site (IRES) that allows for expression of an additional protein, such as a detectable tag (e.g., GFP). In several embodiments, a linker (e.g., a GS linker) is positioned between the CD155tm_3M and the tag. In several embodiments, the polynucleotide encoding the CD155tm_3M and GFP comprises SEQ ID NO: 880 or shares at least about 80%, at least about 85%, at least about 90%, at least about 94%, at least about 95%, at least about 96%, at least about 97%, at least about 98%, or at least about 99%, sequence identity with SEQ ID NO: 880. In several embodiments, the CD155tm_3M-GFP construct comprises the amino acid sequence of SEQ ID NO: 879 or an amino acid that shares at least about 80%, at least about 85%, at least about 90%, at least about 94%, at least about 95%, at least about 96%, at least about 97%, at least about 98%, or at least about 99%, sequence identity with SEQ ID NO: 879.

[0358] In several embodiments, there is provided a polynucleotide encoding an immunosuppressive construct comprising CD31 transmembrane domain (CD31tm). In several embodiments, the CD31tm is coupled to a CD8α signal peptide (e.g., for expression purposes, the sequence of which is provided for separately herein). In several embodiments, the CD31tm immunosuppressive construct comprises a CD8α signal peptide and a CD31-derived protein. In several embodiments, the CD31tm immunosuppressive construct comprises the amino acid sequence set forth in SEQ ID NO:1091. In several embodiments, the CD31tm immunosuppressive construct is encoded by a polynucleotide that encodes an amino acid sequence comprising SEQ ID NO: 885. In several embodiments, the amino acid sequence shares at least about 90%, at least about 94%, at least about 95%, at least about 96%, at least about 97%, at least about 98%, or at least about 99%, sequence identity, homology and/or functional equivalence with SEQ ID NO: 885. In several embodiments, the polynucleotide comprises SEQ ID NO: 886 or shares at least about 80%, at least about 85%, at least about 90%, at least about 94%, at least about 95%, at least about 96%, at least about 97%, at least about 98%, or at least about 99%, sequence identity with SEQ ID NO: 886. Optionally, the polynucleotide encodes a detectable tag (e.g., a FLAG tag) and/or can comprise an internal ribosome entry site (IRES) that allows for expression of an additional protein, such as a detectable tag (e.g., GFP). In several embodiments, a linker (e.g., a GS linker) is positioned between the CD31tm and the tag. In several embodiments, the polynucleotide encoding the CD31tm and GFP comprises SEQ ID NO: 884 or shares at least about 80%, at least about 85%, at least about 90%, at least about 94%, at least about 95%, at least about 96%, at least about 97%, at least about 98%, or at least about 99%, sequence identity with SEQ ID NO: 884. In several embodiments, the CD31tm-GFP construct comprises the amino acid sequence of SEQ ID NO: 883 or an amino acid that shares at least about 80%, at least about 85%, at least about 90%, at least about 94%, at least about 95%, at least about 96%, at least about 97%, at least about 98%, or at least about 99%, sequence identity with SEQ ID NO: 883.

[0359] In several embodiments, there is provided a polynucleotide encoding an immunosuppressive construct comprising CD111 transmembrane domain (CD111tm). In several embodiments, the CD111tm is coupled to a CD8α signal peptide (e.g., for expression purposes, the sequence of which is provided for separately herein). In several embodiments, the CD111tm immunosuppressive construct comprises a CD8α signal peptide and a CD111tm-derived protein. In several embodiments, the CD111tm immunosuppressive construct comprises the amino acid sequence set forth in SEQ ID NO:1092. In several embodiments, the CD111tm immunosuppressive construct is encoded by a polynucleotide that encodes an amino acid sequence comprising SEQ ID NO: 889. In several embodiments, the amino acid sequence shares at least about 90%, at least about 94%, at least about 95%, at least about 96%, at least about 97%, at least about 98%, or at least about 99%, sequence identity, homology and/or functional equivalence with SEQ ID NO: 889. In several embodiments, the polynucleotide comprises SEQ ID NO: 890 or shares at least about 80%, at least about 85%, at least about 90%, at least about 94%, at least about 95%, at least about 96%, at least about 97%, at least about 98%, or at least about 99%, sequence identity with SEQ ID NO: 890. Optionally, the polynucleotide encodes a detectable tag (e.g., a FLAG tag) and/or can comprise an internal ribosome entry site (IRES) that allows for expression of an additional protein, such as a detectable tag (e.g., GFP). In several embodiments, a linker (e.g., a GS linker) is positioned between the CD111tm and the tag. In several embodiments, the polynucleotide encoding the CD111tm and GFP comprises SEQ ID NO: 888 or shares at least about 80%, at least about 85%, at least about 90%, at least about 94%, at least about 95%, at least about 96%, at least about 97%, at least about 98%, or at least about 99%, sequence identity with SEQ ID NO: 888. In several embodiments, the CD111tm-GFP construct comprises the amino acid sequence of SEQ ID NO: 887 or an amino acid that shares at least about 80%, at least about 85%, at least about 90%, at least about 94%, at least about 95%, at least about 96%, at least about 97%, at least about 98%, or at least about 99%, sequence identity with SEQ ID NO: 887.

[0360] In several embodiments, there is provided a polynucleotide encoding an immunosuppressive construct comprising CD200 transmembrane domain (CD200tm). In several embodiments, the CD200tm is coupled to a CD8α signal peptide (e.g., for expression purposes, the sequence of which is provided for separately herein). In several embodiments, the CD200tm immunosuppressive construct comprises a CD8α signal peptide and a CD200tm-derived protein. In several embodiments, the CD200tm immunosuppressive construct comprises the amino acid sequence set forth in SEQ ID NO:1093. In several embodiments, the CD200tm immunosuppressive construct is encoded by a polynucleotide that encodes an amino acid sequence comprising SEQ ID NO: 893. In several embodiments, the amino acid sequence shares at least about 90%, at least about 94%, at least about 95%, at least about 96%, at least about 97%, at least about 98%, or at least about 99%, sequence identity, homology and/or functional equivalence with SEQ ID NO: 893. In several embodiments, the polynucleotide comprises SEQ ID NO: 894 or shares at least about 80%, at least about 85%, at least about 90%, at least about 94%, at least about 95%, at least about 96%, at least about 97%, at least about 98%, or at least about 99%, sequence identity with SEQ ID NO: 894. Optionally, the polynucleotide encodes a detectable tag (e.g., a FLAG tag) and/or can comprise an internal ribosome entry site (IRES) that allows for expression of an additional protein, such as a detectable tag (e.g., GFP). In several embodiments, a linker (e.g., a GS linker) is positioned between the CD200tm and the tag. In several embodiments, the polynucleotide encoding the CD200tm and GFP comprises SEQ ID NO: 892 or shares at least about 80%, at least about 85%, at least about 90%, at least about 94%, at least about 95%, at least about 96%, at least about 97%, at least about 98%, or at least about 99%, sequence identity with SEQ ID NO: 892. In several embodiments, the CD200tm-GFP construct comprises the amino acid sequence of SEQ ID NO: 891 or an amino acid that shares at least about 80%, at least about 85%, at least about 90%, at least about 94%, at least about 95%, at least about 96%, at least about 97%, at least about 98%, or at least about 99%, sequence identity with SEQ ID NO: 891.

[0361] In several embodiments, the engineered cells provided for herein comprise a chimeric receptor that targets NKG2D ligands, wherein the CAR comprises an amino acid of SEQ ID NO: 1024 (LFNQEVQIPLTESYCGPCPKNWICYKNNCYQFFDESKNWYESQASCMSQNASLLKVYSKEDQDLLKLVKS YHWMGLVHIPTNGSWQWEDGSILSPNLLTIIEMQKGDCALYASSFKGYIENCSTPNTYICMQRTVTTTPAPR PPTPAPTIASQPLSLRPEACRPAAGGAVHTRGLDFACDIYIWAPLAGTCGVLLLSLVITLYCRRDQRLPPDAH KPPGGGSFRTPIQEEQADAHSTLAKIRVKFSRSADAPAYQQGQNQLYNELNLGRREEYDVLDKRRGRDPE MGGKPRRKNPQEGLYNELQKDKMAEAYSEIGMKGERRRGKGHDGLYQGLSTATKDTYDALHMQALPPR (e.g., SEQ ID NO: 174) or SEQ ID NO:1025 (LFNQEVQIPLTESYCGPCPKNWICYKNNCYQFFDESKNWYESQASCMSQNASLLKVYSKEDQDLLKLVKS YHWMGLVHIPTNGSWQWEDGSILSPNLLTIIEMQKGDCALYASSFKGYIENCSTPNTYICMQRTVTTTPAPR PPTPAPTIASQPLSLRPEACRPAAGGAVHTRGLDFACDIYIWAPLAGTCGVLLLSLVITLYCRRDQRLPPDAH KPPGGGSFRTPIQEEQADAHSTLAKIRVKFSRSADAPAYQQGQNQLYNELNLGRREEYDVLDKRRGRDPE MGGKPRRKNPQEGLYNELQKDKMAEAYSEIGMKGERRRGKGHDGLYQGLSTATKDTYDALHMQALPPR), (e.g., SEQ ID NO:899), or comprises an amino acid sequence with at least about 80%, at least about 85%, at least about 90%, at least about 94%, at least about 95%, at least about 96%, at least about 97%, at least about 98%, or at least about 99%, sequence identity, homology and/or functional equivalence to SEQ ID NO: 1024, 1025, 174 or 899 and one or more copies of one or more of the following membrane-bound immunosuppressive amino acid sequences: SEQ ID NO: 218, 223, 228, 233, 238, 243, 248, 253, 256, 259, 262, 265, 268, and 271.

[0362] In several embodiments, the engineered cells provided for herein comprise a CAR that targets CD19, wherein the CAR comprises an amino acid of SEQ ID NO: 1026 (DIQMTQSPSSLSASVGDRVTITCRASQDISKYLNWYQQKPGGTVKLLIYHTSRLHSGVPSRFSGSGSGTDFT LTISSLQPEDIATYFCQQGNTLPYTFGGGTKLEITGGGGSGGGGSGGGGSQVQLQESGPGLVKPSQTLSLTC TVSGVSLPDYGVSWIRQPPGKGLEWIGVIWGSETTYYNSALKSRLTISKDNSKNQVSLKLSSVTAADTAVY YCAKHYYYGGSYAMDYWGQGTSVTVSSTTTPAPRPPTPAPTIASQPLSLRPEACRPAAGGAVHTRGLDFA CDIYIWAPLAGTCGVLLLSLVITLYCRRDQRLPPDAHKPPGGGSFRTPIQEEQADAHSTLAKIRVKFSRSADA PAYQQGQNQLYNELNLGRREEYDVLDKRRGRDPEMGGKPRRKNPQEGLYNELQKDKMAEAYSEIGMKG ERRRGKGHDGLYQGLSTATKDTYDALHMQALPPRGSGEGRGSLLTCGDVEENPGPMALPVTALLLPLALL LHAARPNWVNVISDLKKIEDLIQSMHIDATLYTESDVHPSCKVTAMKCFLLELQVISLESGDASIHDTVENLI ILANNSLSSNGNVTESGCKECEELEEKNIKEFLQSFVHIVQMFINTSTTTPAPRPPTPAPTIASQPLSLRPEACR PAAGGAVHTRGLDFACDIYIWAPLAGTCGVLLLSLVITLYC), (e.g., SEQ ID NO: 178) or SEQ ID NO:1027 (DIQMTQSPSSLSASVGDRVTITCRASQDISKYLNWYQQKPGGTVKLLIYHTSRLHSGVPSRFSGSGSGTDFT LTISSLQPEDIATYFCQQGNTLPYTFGGGTKLEITGGGGSGGGGSGGGGSQVQLQESGPGLVKPSQTLSLTC TVSGVSLPDYGVSWIRQPPGKGLEWIGVIWGSETTYYNSALKSRLTISKDNSKNQVSLKLSSVTAADTAVY YCAKHYYYGGSYAMDYWGQGTSVTVSSTTTPAPRPPTPAPTIASQPLSLRPEACRPAAGGAVHTRGLDFA CDIYIWAPLAGTCGVLLLSLVITLYCRRDQRLPPDAHKPPGGGSFRTPIQEEQADAHSTLAKIRVKFSRSADA PAYQQGQNQLYNELNLGRREEYDVLDKRRGRDPEMGGKPRRKNPQEGLYNELQKDKMAEAYSEIGMKG ERRRGKGHDGLYQGLSTATKDTYDALHMQALPPR), (e.g., SEQ ID NO:901), or comprises an amino acid sequence with at least about 80%, at least about 85%, at least about 90%, at least about 94%, at least about 95%, at least about 96%, at least about 97%, at least about 98%, or at least about 99%, sequence identity, homology and/or functional equivalence to SEQ ID NO: 178 or 901 and one or more copies of one or more of the following membrane-bound immunosuppressive amino acid sequences: SEQ ID NO: 218, 223, 228, 233, 238, 243, 248, 253, 256, 259, 262, 265, 268, and 271.

[0363] In several embodiments, the engineered cells provided for herein comprise a CAR that targets CD19, wherein the CAR is encoded by SEQ ID NO: 466, or comprises an nucleicacid sequence with at least about 80%, at least about 85%, at least about 90%, at least about 94%, at least about 95%, at least about 96%, at least about 97%, at least about 98%, or at least about 99%, sequence identity, homology and/or functional equivalence to the sequence encoded by SEQ ID NO: 466 and one or more copies of one or more of the following membrane-bound immunosuppressive amino acid sequences: SEQ ID NO: 218, 223, 228, 233, 238, 243, 248, 253, 256, 259, 262, 265, 268, and 271.

[0364] In several embodiments, the engineered cells provided for herein comprise a CAR that targets CD70, wherein the CAR comprises an amino acid of any of SEQ ID NOs: 383-465 or 912-994, or comprises an amino acid sequence with at least about 80%, at least about 85%, at least about 90%, at least about 94%, at least about 95%, at least about 96%, at least about 97%, at least about 98%, or at least about 99%, sequence identity, homology and/or functional equivalence to any of SEQ ID NO: 383-465 or 912-994 and one or more copies of one or more of the following membrane-bound immunosuppressive amino acid sequences: SEQ ID NO: 218, 223, 228, 233, 238, 243, 248, 253, 256, 259, 262, 265, 268, and 271.

[0365] It is contemplated that any of the amino acid sequences provided herein may be provided with or without a signal sequence (e.g., a CD8α signal sequence, such as MALPVTALLLPLALLLHAARP). It is also contemplated that any of the amino acid sequences provided herein may be provided with or without an initial methionine (M) residue.

### HLA-Modification

[0366] In several embodiments, immune cells are engineered to alter their HLA expression profile, order to interact with one or more inhibitory receptors on host immune cells. In several embodiments, the alteration of the HLA expression profile of engineered cells functions to impart to the engineered immune cell the ability to reduce or avoid cytotoxicity or other immune clearance by host immune cells (or other engineered immune cells), thereby enhancing the persistence (and thus functional life-span) of the engineered immune cells.

[0367] Human leukocyte antigen-E (HLA-E) is a major ligand for the natural killer inhibitory receptor CD94/NKG2A that is expressed on NK cells. When HLA-E is bound by the CD94/NKG2A complex, an inhibitory signaling cascade is initiated, resulting in reduced NK cell activity. Thus, expression of HLA-E can dampen the cytotoxic effects of host NK cells against an engineered immune cell (e.g., expressing a CAR and/or immunosuppressive peptides). Likewise, HLA-G also plays an important role in inhibiting natural killer (NK) cell function, not only in the maintenance of fetal-maternal immune tolerance but also in the context of organ or tissue transplantation. It also plays a role in the immune escape of tumors from host immune cells. HLA-G can inhibit the function of many immune cells such as NK cells, CD4+ and CD8+ T cells, and dendritic cells by binding to cell surface-expressed receptors, including immunoglobulin-like transcript 2 (ILT2), ILT4 and killer cell immunoglobulin-like receptor 2DL4 (KIR2DL4). In several embodiments, immune cells as disclosed herein are engineered to express HLA-E and/or HLA-G in order to suppress host NK cell (or other engineered NK cells administered) against the engineered immune cells.

[0368] Non-limiting embodiments of such an approach are schematically depicted in FIGS. 10I-10J. FIG. 10I shows an engineered immune cell according to embodiments disclosed herein that expresses a CAR comprising an immunosuppressive domain as well as a membrane-bound immunosuppressive construct. In some embodiments, expression of HLA-E and/or HLA-G is in connection with a CAR and not a membrane-bound immunosuppressive construct, or optionally with a CAR that does not include an immunosuppressive domain. FIG. 10J schematically depicts another non-limiting embodiment wherein HLA-E and/or HLA-G are co-expressed with one or more membrane-bound immunosuppressive constructs, optionally a CAR (with or without an integrated immunosuppressive domain) and optionally one or more additional immunosuppressive proteins (non-limiting examples of with include, but are not limited to CD47, PD-L1, and the poliovirus receptor (PVR, also known as CD155). As discussed above, each of CD47, PD-L1 and CD155 can operate to reduce activity of immune cells (e.g., host immune cells and/or other administered engineered immune cells). Any combination of these molecules, or any others disclosed herein can be used.

[0369] In several embodiments, such as when B2M expression is reduced or knocked out, endogenous HLA expression is lost, and in several embodiments, specific re-expression of HLA-E and or HLA-G can aid in reduce NK cell activity against immune cells engineered to express HLA-E and or HLA-G. In several embodiments, this re-expression is coupled with gene editing to reduce NKG2A expression on NK cells to be administered, which limits the suppressive effect of HLA-E on the therapeutic cells themselves. In several embodiments, HLA-E expression is specifically introduced only on T cells. In several embodiments, those T cells operate to suppress NK cell activity via interaction with the NKG2A receptor on NK cells. In some embodiments, the activity of the engineered allogeneic NK cells is suppressed temporarily. In several embodiments, the temporary suppression of engineered allogeneic NK cell activity reduces the risk of NK cell exhaustion, which prolongs the persistence of the engineered allogeneic NK cells.

[0370] In several embodiments, there is provided a polynucleotide encoding HLA-E. In several embodiments, the polynucleotide encodes an HLA-E amino acid sequence comprising SEQ ID NO: 273: HSLKYFHTSVSRPGRGEPRFISVGYVDDTQFVRFDNDAASPRMVPRAPWMEQEGSEYWDRETRSARDTAQ IFRVNLRTLRGYYNQSEAGSHTLQWMHGCELGPDRRFLRGYEQFAYDGKDYLTLNEDLRSWTAVDTAAQ ISEQKSNDASEAEHQRAYLEDTCVEWLHKYLEKGKETLLHLEPPKTHVTHHPISDHEATLRCWALGFYPAE ITLTWQQDGEGHTQDTELVETRPAGDGTFQKWAAVVVPSGEEQRYTCHVQHEGLPEPVTLRWKPASQPTI PIVGIIAGLVLLGSVVSGAVVAAVIWRKKSSGGKGGSYYKAEWSDSAQGSESHSL.

[0371] In several embodiments, the polynucleotide encodes a sequence that shares at least about 80%, at least about 85%, at least about 90%, at least about 94%, at least about 95%, at least about 96%, at least about 97%, at least about 98%, or at least about 99%, sequence identity, homology and/or functional equivalence with SEQ ID NO: 273. In several embodiments, the polynucleotide comprises SEQ ID NO: 274 or shares at least about 90%, at least about 94%, at least about 95%, at least about 96%, at least about 97%, at least about 98%, or at least about 99%, sequence identity with SEQ ID NO: 274. In several embodiments, the encoded HLA-E is an HLA-E single chain trimer (SCT) composed of a canonical HLA-E binding peptide, mature human beta2-microglobulin, and mature HLA-E heavy chain (HLA-E trimer_SS). In several embodiments, the construct comprises a CD8α signal peptide, a first B2M sequence, an HLG peptide leader sequence, a linker (e.g., a GS linker), a second B2M sequence, a linker (e.g., a second GS linker), and an HLA-E sequence. In several embodiments, the HLA-E trimer_SS construct is encoded by a polynucleotide that encodes an amino acid sequence comprising SEQ ID NO: 1094 (SRSVALAVLALLSLSGLEAVMAPRTLFLGGGGSGGGGSGGGGSIQRTPKIQVYSRHPAENGKSNFLNCYVS GFHPSDIEVDLLKNGERIEKVEHSDLSFSKDWSFYLLYYTEFTPTEKDEYACRVNHVTLSQPKIVKWDRDM GGGGSGGGGSGGGGSGGGGSGSHSLKYFHTSVSRPGRGEPRFISVGYVDDTQFVRFDNDAASPRMVPRAP WMEQEGSEYWDRETRSARDTAQIFRVNLRTLRGYYNQSEAGSHTLQWMHGCELGPDRRFLRGYEQFAYD GKDYLTLNEDLRSWTAVDTAAQISEQKSNDASEAEHQRAYLEDTCVEWLHKYLEKGKETLLHLEPPKTHV THHPISDHEATLRCWALGFYPAEITLTWQQDGEGHTQDTELVETRPAGDGTFQKWAAVVVPSGEEQRYTC HVQHEGLPEPVTLRWKPASQPTIPIVGIIAGLVLLGSVVSGAVVAAVIWRKKSSGGKGGSYYKAEWSDSAQ GSESHSL), (e.g., SEQ ID NO: 276) or SEQ ID NO:1017 (SRSVALAVLALLSLSGLEAVMAPRTLFLGGGGSGGGGSGGGGSIQRTPKIQVYSRHPAENGKSNFLNCYVS GFHPSDIEVDLLKNGERIEKVEHSDLSFSKDWSFYLLYYTEFTPTEKDEYACRVNHVTLSQPKIVKWDRDM GGGGSGGGGSGGGGSGGGGSGSHSLKYFHTSVSRPGRGEPRFISVGYVDDTQFVRFDNDAASPRMVPRAP WMEQEGSEYWDRETRSARDTAQIFRVNLRTLRGYYNQSEAGSHTLQWMHGCELGPDRRFLRGYEQFAYD GKDYLTLNEDLRSWTAVDTAAQISEQKSNDASEAEHQRAYLEDTCVEWLHKYLEKGKETLLHLEPPKTHV THHPISDHEATLRCWALGFYPAEITLTWQQDGEGHTQDTELVETRPAGDGTFQKWAAVVVPSGEEQRYTC HVQHEGLPEPVTLRWKPASQPTIPIVGIIAGLVLLGSVVSGAVVAAVIWRKKSSGGKGGSYYKAEWSDSAQ GSESHSL), (e.g., SEQ ID NO: 689). In several embodiments, the polynucleotide encodes a sequence that shares at least about 80%, at least about 85%, at least about 90%, at least about 94%, at least about 95%, at least about 96%, at least about 97%, at least about 98%, or at least about 99%, sequence identity, homology and/or functional equivalence with SEQ ID NO: 276 or SEQ ID NO: 689. In several embodiments, the polynucleotide comprises SEQ ID NO: 277 (or SEQ ID NO: 690) or shares at least about 80%, at least about 85%, at least about 90%, at least about 94%, at least about 95%, at least about 96%, at least about 97%, at least about 98%, or at least about 99%, sequence identity with SEQ ID NO: 277 or SEQ ID NO: 690. Optionally, the polynucleotide encodes a detectable tag (e.g., a FLAG tag) and/or can comprise an internal ribosome entry site (IRES) that allows for expression of an additional protein, such as a detectable tag (e.g., GFP). In several embodiments, the polynucleotide encoding the HLA-E trimer_SS construct and GFP comprises SEQ ID NO: 275 or shares at least about 80%, at least about 85%, at least about 90%, at least about 94%, at least about 95%, at least about 96%, at least about 97%, at least about 98%, or at least about 99%, sequence identity with SEQ ID NO: 275. In several embodiments, the polynucleotide encoding the HLA-E trimer_SS construct, a FLAG tag, and GFP comprises SEQ ID NO: 688 or shares at least about 80%, at least about 85%, at least about 90%, at least about 94%, at least about 95%, at least about 96%, at least about 97%, at least about 98%, or at least about 99%, sequence identity with SEQ ID NO: 688. In several embodiments, the HLA-E trimer_SS construct with a FLAG tag and GFP is encoded by a polynucleotide that encodes an amino acid sequence comprising SEQ ID NO: 687, or having at least about 80%, at least about 85%, at least about 90%, at least about 94%, at least about 95%, at least about 96%, at least about 97%, at least about 98%, or at least about 99%, sequence identity with SEQ ID NO: 687.

[0372] In several embodiments, similar constructs are provided for HLA-G wherein the HLA-G trimer_SS construct comprises a CD8α signal peptide, a first B2M sequence, an HLG peptide leader sequence, a linker (e.g., a GS linker), a second B2M sequence, a linker (e.g., a second GS linker), and an HLA-G sequence. In several embodiments, the HLA-G trimer_SS construct is encoded by a polynucleotide that encodes an amino acid sequence comprising SEQ ID NO: 1095 (SRSVALAVLALLSLSGLEAVMAPRTLFLGGGGSGGGGSGGGGSIQRTPKIQVYSRHPAENGKSNFLNCYVS GFHPSDIEVDLLKNGERIEKVEHSDLSFSKDWSFYLLYYTEFTPTEKDEYACRVNHVTLSQPKIVKWDRDM GGGGSGGGGSGGGGSGGGGSGSLLSGALTLTETWAGSHSMRYFSAAVSRPGRGEPRFIAMGYVDDTQFV RFDSDSACPRMEPRAPWVEQEGPEYWEEETRNTKAHAQTDRMNLQTLRGYYNQSEASSHTLQWMIGCDL GSDGRLLRGYEQYAYDGKDYLALNEDLRSWTAADTAAQISKRKCEAANVAEQRRAYLEGTCVEWLHRY LENGKEMLQRADPPKTHVTHHPVFDYEATLRCWALGFYPAEIILTWQRDGEDQTQDVELVETRPAGDGTF QKWAAVVVPSGEEQRYTCHVQHEGLPEPLMLRWKQSSLPTIPIMGIVAGLVVLAAVVTGAAVAAVLWRK KSSD), (e.g., SEQ ID NO: 279). In several embodiments, the polynucleotide encodes a sequence that shares at least about 80%, at least about 85%, at least about 90%, at least about 94%, at least about 95%, at least about 96%, at least about 97%, at least about 98%, or at least about 99%, sequence identity, homology and/or functional equivalence with SEQ ID NO: 279. In several embodiments, the HLA-G polypeptide comprises SEQ ID NO:278. In several embodiments, the HLA-G polypeptide comprises a functional portion of SEQ ID NO: 278.

[0373] In the context of viral infection, MHC class I-restricted CD8+ cytotoxic T lymphocytes are recruited to control viral infections. These cytotoxic T lymphocytes recognize and lyse virus-infected cells through engagement of the lymphocyte T cell receptor with MHC class I molecules that present viral antigens on the surface of infected cells. MHC class I heavy chain associates with beta-2 microglobulin (B2M) to form a heterodimer, which constitutes part of the MHC class I peptide-loading complex. Human cytomegalovirus has evolved several gene products of the unique short region protein, US2, US3, US6, and US11, which interfere with antigen presentation and cell surface expression of MHC class I molecules. While interference in antigen presentation and MHC class I down-regulation on the cell surface allows infected cells to evade virus-specific cytotoxic T lymphocytes, the down-regulation of MHC class I molecules renders the virally infected cells more susceptible to host NK cells. To counteract this, human cytomegalovirus encodes multiple genes that function to evade NK-mediated cell lysis of infected cells, one of which is UL18. UL18 binds LIR-1, an NK cell inhibitory receptor. UL18 shares a high level of amino acid sequence identity with MHC class I and therefore UL18 can act as an MHCI surrogate and associate with B2M. Thus, in several embodiments, a chimeric UL18-B2M construct (see a non-limiting schematic at FIG. 12) is expressed on engineered cells as disclosed herein, enabling UL18 interaction with the LIR-1 receptor on NK cells (either host or administered) and reduce the cytotoxic activity of those NK cells against the engineered UL18-expressing immune cell.

[0374] In several embodiments, there is provided a polynucleotide encoding UL18. In several embodiments, the UL18-encoding polynucleotide encodes an amino acid sequence comprising SEQ ID NO: 1042 (HVLRYGYTGIFDDTSHMTLTVVGIFDGQHFFTYHVNSSDKASSRANGTISWMANVSAAYPTYLDGERAK GDLIFNQTEQNLLELEIALGYRSQSVLTWTHECNTTENGSFVAGYEGFGWDGETLMELKDNLTLWTGPNY EISWLKQNKTYIDGKIKNISEGDTTIQRNYLKGNCTQWSVIYSGFQTPVTHPVVKGGVRNQNDNRAEAFCT SYGFFPGEINITFIHYGNKAPDDSEPQCNPLLPTFDGTFHQGCYVAIFCNQNYTCRVTHGNWTVEIPISVTSP DDSSSGEVPDHPTANKRYNTMTISSVLLALLLCALLFAFLHYFTTLKQYLRNLAFAWRYRKVRSS) (e.g., SEQ ID NO: 280). In several embodiments, the polynucleotide encodes a sequence that shares at least about 80%, at least about 85%, at least about 90%, at least about 94%, at least about 95%, at least about 96%, at least about 97%, at least about 98%, or at least about 99%, sequence identity, homology and/or functional equivalence with SEQ ID NO: 280. In several embodiments, the polynucleotide comprises SEQ ID NO: 281 or shares at least about 80%, at least about 85%, at least about 90%, at least about 94%, at least about 95%, at least about 96%, at least about 97%, at least about 98%, or at least about 99%, sequence identity with SEQ ID NO: 281. In several embodiments, the encoded UL18 is a chimeric UL18-B2M single chain trimer (SCT) composed of a canonical HLA-E binding peptide, mature human beta2-microglobulin, and UL18. In several embodiments, the chimeric UL18-B2M construct comprises a CD8α signal peptide, a first B2M sequence, an HLG peptide leader sequence, a linker (e.g., a GS linker), a second B2M sequence, a linker (e.g., a second GS linker), an a UL18 sequence. In several embodiments, the chimeric UL18-B2M construct is encoded by a polynucleotide that encodes an amino acid sequence comprising SEQ ID NO: 1096 (SRSVALAVLALLSLSGLEAVMAPRTLFLGGGGSGGGGSGGGGSIQRTPKIQVYSRHPAENGKSNFLNCYVS GFHPSDIEVDLLKNGERIEKVEHSDLSFSKDWSFYLLYYTEFTPTEKDEYACRVNHVTLSQPKIVKWDRDM GGGGSGGGGSGGGGSGGGGSGSMHVLRYGYTGIFDDTSHMTLTVVGIFDGQHFFTYHVNSSDKASSRAN GTISWMANVSAAYPTYLDGERAKGDLIFNQTEQNLLELEIALGYRSQSVLTWTHECNTTENGSFVAGYEGF GWDGETLMELKDNLTLWTGPNYEISWLKQNKTYIDGKIKNISEGDTTIQRNYLKGNCTQWSVIYSGFQTPV THPVVKGGVRNQNDNRAEAFCTSYGFFPGEINITFIHYGNKAPDDSEPQCNPLLPTFDGTFHQGCYVAIFCN QNYTCRVTHGNWTVEIPISVTSPDDSSSGEVPDHPTANKRYNTMTISSVLLALLLCALLFAFLHYFTTLKQY LRNLAFAWRYRKVRSS), (e.g., SEQ ID NO: 283). In several embodiments, the polynucleotide encodes a sequence that shares at least about 80%, at least about 85%, at least about 90%, at least about 94%, at least about 95%, at least about 96%, at least about 97%, at least about 98%, or at least about 99%, sequence identity, homology and/or functional equivalence with SEQ ID NO: 283 or SEQ ID NO: 686. In several embodiments, the polynucleotide comprises SEQ ID NO: 284 (or SEQ ID NO: 685) or shares at least about 80%, at least about 85%, at least about 90%, at least about 94%, at least about 95%, at least about 96%, at least about 97%, at least about 98%, or at least about 99%, sequence identity with SEQ ID NO: 284 (or SEQ ID NO: 685). Optionally, the polynucleotide encodes a detectable tag (e.g., a FLAG tag) and/or can comprise an internal ribosome entry site (IRES) that allows for expression of an additional protein, such as a detectable tag (e.g., GFP). In several embodiments, the polynucleotide encoding the chimeric UL18-B2M construct and GFP comprises SEQ ID NO: 292 or shares at least about 80%, at least about 85%, at least about 90%, at least about 94%, at least about 95%, at least about 96%, at least about 97%, at least about 98%, or at least about 99%, sequence identity with SEQ ID NO: 292. In several embodiments, the polynucleotide encoding the chimeric UL18-B2M construct, a FLAG tag and GFP comprises SEQ ID NO: 684 or shares at least about 80%, at least about 85%, at least about 90%, at least about 94%, at least about 95%, at least about 96%, at least about 97%, at least about 98%, or at least about 99%, sequence identity with SEQ ID NO: 684. In additional embodiments, the polynucleotide encoding the chimeric UL18-B2M construct with a FLAG tag and GFP encodes the amino acid sequence of SEQ ID NO: 684 or a sequence that shares at least about 80%, at least about 85%, at least about 90%, at least about 94%, at least about 95%, at least about 96%, at least about 97%, at least about 98%, or at least about 99%, sequence identity, homology and/or functional equivalence with SEQ ID NO: 684. In additional embodiments, the polynucleotide encoding the chimeric UL18-B2M construct encodes the amino acid sequence of SEQ ID NO: 285 or a sequence that shares at least about 80%, at least about 85%, at least about 90%, at least about 94%, at least about 95%, at least about 96%, at least about 97%, at least about 98%, or at least about 99%, sequence identity, homology and/or functional equivalence with SEQ ID NO: 285. In several embodiments, the polynucleotide comprises SEQ ID NO: 281 or shares at least about 80%, at least about 85%, at least about 90%, at least about 94%, at least about 95%, at least about 96%, at least about 97%, at least about 98%, or at least about 99%, sequence identity with SEQ ID NO: 285.

[0375] In several embodiments, the engineered cells provided for herein comprise a chimeric receptor that targets NKG2D ligands, wherein the CAR comprises an amino acid of SEQ ID NO: 174 or 899, or comprises an amino acid sequence with at least about 80%, at least about 85%, at least about 90%, at least about 94%, at least about 95%, at least about 96%, at least about 97%, at least about 98%, or at least about 99%, sequence identity, homology and/or functional equivalence to SEQ ID NO: 174 or 899 and one or more copies of one or more of the following membrane-bound immunosuppressive constructs: SEQ ID NO: 273, 276, 279, 280, or 283.

[0376] In several embodiments, the engineered cells provided for herein comprise a CAR that targets CD19, wherein the CAR comprises an amino acid of SEQ ID NO: 178 or 901, or comprises an amino acid sequence with at least about 80%, at least about 85%, at least about 90%, at least about 94%, at least about 95%, at least about 96%, at least about 97%, at least about 98%, or at least about 99%, sequence identity, homology and/or functional equivalence to SEQ ID NO: 178 or 901 and one or more copies of one or more of the following membrane-bound immunosuppressive constructs: SEQ ID NO: 273, 276, 279, 280, or 283.

[0377] In several embodiments, the engineered cells provided for herein comprise a CAR that targets CD19, wherein the CAR is encoded by SEQ ID NO: 466, or comprises an amino acid sequence with at least about 80%, at least about 85%, at least about 90%, at least about 94%, at least about 95%, at least about 96%, at least about 97%, at least about 98%, or at least about 99%, sequence identity, homology and/or functional equivalence to the sequence encoded by SEQ ID NO: 466 and one or more copies of one or more of the following membrane-bound immunosuppressive constructs: SEQ ID NO: 273, 276, 279, 280, or 283.

[0378] In several embodiments, the engineered cells provided for herein comprise a chimeric receptor that targets NKG2D ligands, wherein the CAR comprises an amino acid of SEQ ID NO: 1024 or 1025, or comprises an amino acid sequence with at least about 80%, at least about 85%, at least about 90%, at least about 94%, at least about 95%, at least about 96%, at least about 97%, at least about 98%, or at least about 99%, sequence identity, homology and/or functional equivalence to SEQ ID NO: 1024 or 1025 and one or more copies of one or more of the following membrane-bound immunosuppressive constructs: SEQ ID NO: 273, 1094, 1095, 1042, or 1096.

[0379] In several embodiments, the engineered cells provided for herein comprise a CAR that targets CD19, wherein the CAR comprises an amino acid of SEQ ID NO: 1026 or 1027, or comprises an amino acid sequence with at least about 80%, at least about 85%, at least about 90%, at least about 94%, at least about 95%, at least about 96%, at least about 97%, at least about 98%, or at least about 99%, sequence identity, homology and/or functional equivalence to SEQ ID NO: 1026 or 1027 and one or more copies of one or more of the following membrane-bound immunosuppressive constructs: SEQ ID NO: 273, 1094, 1095, 1042, or 1096.

[0380] In several embodiments, the engineered cells provided for herein comprise a CAR that targets CD19, wherein the CAR is encoded by SEQ ID NO: 1097, or comprises an amino acid sequence with at least about 80%, at least about 85%, at least about 90%, at least about 94%, at least about 95%, at least about 96%, at least about 97%, at least about 98%, or at least about 99%, sequence identity, homology and/or functional equivalence to the sequence encoded by SEQ ID NO: 466 and one or more copies of one or more of the following membrane-bound immunosuppressive constructs: SEQ ID NO: 273, 1094, 1095, 1042, or 1096. In several embodiments, the engineered cells provided for herein comprise a CAR that targets CD19, wherein the CAR comprises a combination of one or more of SEQ ID NOs: 6, 8, 10, 12, 14, 16, 22, 118, 120, 895, 897, or 1009.

[0381] In several embodiments, the engineered cells provided for herein comprise a CAR that targets CD70, wherein the CAR comprises an amino acid of any of SEQ ID NOs: 383-465 or 912-994, or comprises an amino acid sequence with at least about 80%, at least about 85%, at least about 90%, at least about 94%, at least about 95%, at least about 96%, at least about 97%, at least about 98%, or at least about 99%, sequence identity, homology and/or functional equivalence to any of SEQ ID NO: 383-465 or 912-994 and one or more copies of one or more of the following membrane-bound immunosuppressive constructs: SEQ ID NO: 273, 276, 279, 280, or 283.

[0382] As discussed herein, in several embodiments, knockout of B2M expression results in loss of MHC expression on the edited cell. In several embodiments, the loss of MHC expression, such as on an edited T cell, renders that cell susceptible to attack from other cells, such as NK cells, that no longer recognize the edited cell as a “self” cell. However, in several embodiments, HLA can be re-expressed, for example HLA-E or HLA-G. In several embodiments, the re-expression of the HLA is accomplished using a disulfide trap single chain trimer (dtSCT) is used to express HLA-E and/or HLA-G and, optionally, an immunosuppressive peptide, as well as B2M (HLA-E_STE20, also referred to as HLA-E (PBL20). Provided for herein, in several embodiments, is a polynucleotide encoding a chimeric immunosuppressive construct comprising an HLA-G peptide, mature B2M and mature HLA-E. In several embodiments, such a construct comprises one or more linkers. In several embodiments, the immunosuppressive construct comprises a B2M signal peptide (at least about 85%, at least about 90%, at least about 94%, at least about 95%, at least about 96%, at least about 97%, at least about 98%, or at least about 99%, identical to SEQ ID NO:1018 (SRSVALAVLALLSLSGLEA), (e.g. SEQ ID NO: 1003) an HLA-G peptide (amino acids 3-11 of HLA-G; at least about 85%, at least about 90%, at least about 94%, at least about 95%, at least about 96%, at least about 97%, at least about 98%, or at least about 99%, identical to SEQ ID NO: 1005), a disulfide-bridge containing linker (e.g., a GS linker comprising at least two cysteine residues; at least about 85%, at least about 90%, at least about 94%, at least about 95%, at least about 96%, at least about 97%, at least about 98%, or at least about 99%, identical to SEQ ID NO: 1009), a mature B2M domain (at least about 85%, at least about 90%, at least about 94%, at least about 95%, at least about 96%, at least about 97%, at least about 98%, or at least about 99%, identical to SEQ ID NO: 1011), an additional linker (e.g., a GS linker), and a mature HLA-E domain (at least about 85%, at least about 90%, at least about 94%, at least about 95%, at least about 96%, at least about 97%, at least about 98%, or at least about 99%, identical to SEQ ID NO: 1013). In several embodiments, the HLA-E_STE20 is encoded by a polynucleotide that encodes an amino acid sequence comprising SEQ ID NO: 829. In several embodiments, the amino acid sequence shares at least about 90%, at least about 94%, at least about 95%, at least about 96%, at least about 97%, at least about 98%, or at least about 99%, sequence identity, homology and/or functional equivalence with SEQ ID NO: 829. In several embodiments, the B2M signal peptide is encoded by a nucleic acid that is at least about 85%, at least about 90%, at least about 94%, at least about 95%, at least about 96%, at least about 97%, at least about 98%, or at least about 99%, identical to SEQ ID NO: 1001. In several embodiments, the HLA-G peptide is encoded by a nucleic acid that is at least about 85%, at least about 90%, at least about 94%, at least about 95%, at least about 96%, at least about 97%, at least about 98%, or at least about 99%, identical to SEQ ID NO: 1004. In several embodiments, the disulfide-bridge containing linker is encoded by a nucleic acid that is at least about 85%, at least about 90%, at least about 94%, at least about 95%, at least about 96%, at least about 97%, at least about 98%, or at least about 99%, identical to SEQ ID NO: 1008. In several embodiments, the mature B2M is encoded by a nucleic acid that is at least about 85%, at least about 90%, at least about 94%, at least about 95%, at least about 96%, at least about 97%, at least about 98%, or at least about 99%, identical to SEQ ID NO: 1010. In several embodiments, an additional copy of the disulfide-bridge containing linker is use after the B2M and links the B2M with a mature HLA-E domain. In several embodiments, the mature HLA-e domain is encoded by a nucleic acid that is at least about 85%, at least about 90%, at least about 94%, at least about 95%, at least about 96%, at least about 97%, at least about 98%, or at least about 99%, identical to SEQ ID NO: 1012. In several embodiments, the polynucleotide encoding the immunosuppressive construct comprises SEQ ID NO: 830 or shares at least about 80%, at least about 85%, at least about 90%, at least about 94%, at least about 95%, at least about 96%, at least about 97%, at least about 98%, or at least about 99%, sequence identity with SEQ ID NO: 830. Optionally, the polynucleotide encodes a detectable tag (e.g., a FLAG tag) and/or can comprise an internal ribosome entry site (IRES) that allows for expression of an additional protein, such as a detectable tag (e.g., GFP). In several embodiments, a linker (e.g., a GS linker) is positioned between the HLA-E_STE20 and the tag. In several embodiments, the polynucleotide encoding HLA-E_STE20 and GFP comprises SEQ ID NO: 828 or shares at least about 80%, at least about 85%, at least about 90%, at least about 94%, at least about 95%, at least about 96%, at least about 97%, at least about 98%, or at least about 99%, sequence identity with SEQ ID NO: 828. In several embodiments, the HLA-E_STE20-GFP construct comprises the amino acid sequence of SEQ ID NO: 827 or an amino acid that shares at least about 80%, at least about 85%, at least about 90%, at least about 94%, at least about 95%, at least about 96%, at least about 97%, at least about 98%, or at least about 99%, sequence identity with SEQ ID NO: 827.

[0383] In additional embodiments, there is provided a chimeric immunosuppressive construct comprising an HLA-G peptide, mature B2M and mature HLA-E, and comprising an alternative B2M signal peptide (referred to as HLA-E (PBL20) (E1-5-sgRNA resistant)). In several embodiments, the nucleotide encoding the B2M signal peptide is different from, for example, that of the construct described above, but encodes the same amino acid sequence. In several embodiments, the alternative signal peptide confers enhanced resistance to degradation. In several embodiments, the B2M signal peptide is at least about 85%, at least about 90%, at least about 94%, at least about 95%, at least about 96%, at least about 97%, at least about 98%, or at least about 99%, identical to the amino acid sequence of SEQ ID NO: 1003, but is encoded by a polynucleotide at least about 85%, at least about 90%, at least about 94%, at least about 95%, at least about 96%, at least about 97%, at least about 98%, or at least about 99%, identical to SEQ ID NO: 1002. In several embodiments, the remainder of the construct remains the same as described above, e.g., an HLA-G peptide (amino acids 3-11 of HLA-G; at least about 85%, at least about 90%, at least about 94%, at least about 95%, at least about 96%, at least about 97%, at least about 98%, or at least about 99%, identical to SEQ ID NO: 1005), a disulfide-bridge containing linker (e.g., a GS linker comprising at least two cysteine residues; at least about 85%, at least about 90%, at least about 94%, at least about 95%, at least about 96%, at least about 97%, at least about 98%, or at least about 99%, identical to SEQ ID NO: 1009), a mature B2M domain (at least about 85%, at least about 90%, at least about 94%, at least about 95%, at least about 96%, at least about 97%, at least about 98%, or at least about 99%, identical to SEQ ID NO: 1011), an additional linker (e.g., another copy of the GS linker), and a mature HLA-E domain (at least about 85%, at least about 90%, at least about 94%, at least about 95%, at least about 96%, at least about 97%, at least about 98%, or at least about 99%, identical to SEQ ID NO: 1013). In several embodiments, the HLA-E (PBL20) (E1-5-sgRNA resistant) is encoded by a polynucleotide that encodes an amino acid sequence comprising SEQ ID NO: 997. In several embodiments, the amino acid sequence shares at least about 90%, at least about 94%, at least about 95%, at least about 96%, at least about 97%, at least about 98%, or at least about 99%, sequence identity, homology and/or functional equivalence with SEQ ID NO: 997. In several embodiments, the B2M signal peptide is encoded by a nucleic acid that is at least about 85%, at least about 90%, at least about 94%, at least about 95%, at least about 96%, at least about 97%, at least about 98%, or at least about 99%, identical to SEQ ID NO: 1002. In several embodiments, the remainder of the immunosuppressive construct is encoded by the polynucleotides as described above, e.g., the HLA-G peptide is encoded by a nucleic acid that is at least about 85%, at least about 90%, at least about 94%, at least about 95%, at least about 96%, at least about 97%, at least about 98%, or at least about 99%, identical to SEQ ID NO: 1004, the disulfide-bridge continaing linkers (one between the HLA-G and mature B2M domains, and another between the mature B2M and HLA-E domains) are encoded by a nucleic acid that is at least about 85%, at least about 90%, at least about 94%, at least about 95%, at least about 96%, at least about 97%, at least about 98%, or at least about 99%, identical to SEQ ID NO: 1008, the mature B2M is encoded by a nucleic acid that is at least about 85%, at least about 90%, at least about 94%, at least about 95%, at least about 96%, at least about 97%, at least about 98%, or at least about 99%, identical to SEQ ID NO: 1010, and a mature HLA-e domain is encoded by a nucleic acid that is at least about 85%, at least about 90%, at least about 94%, at least about 95%, at least about 96%, at least about 97%, at least about 98%, or at least about 99%, identical to SEQ ID NO: 1012. In several embodiments, the polynucleotide encoding the immunosuppressive construct comprises SEQ ID NO: 998 or shares at least about 80%, at least about 85%, at least about 90%, at least about 94%, at least about 95%, at least about 96%, at least about 97%, at least about 98%, or at least about 99%, sequence identity with SEQ ID NO: 998. Optionally, the polynucleotide encodes a detectable tag (e.g., a FLAG tag) and/or can comprise an internal ribosome entry site (IRES) that allows for expression of an additional protein, such as a detectable tag (e.g., GFP).

[0384] In additional embodiments, there is provided a chimeric immunosuppressive construct comprising an HLA-G peptide, mature B2M and mature HLA-E, and comprising an alternative linker structure (referred to as HLA-E (PBL15)). As above, in several embodiments, the B2M signal peptide is at least about 85%, at least about 90%, at least about 94%, at least about 95%, at least about 96%, at least about 97%, at least about 98%, or at least about 99%, identical to the amino acid sequence of SEQ ID NO: 1003. In several embodiments, the B2M signal peptide is at least about 85%, at least about 90%, at least about 94%, at least about 95%, at least about 96%, at least about 97%, at least about 98%, or at least about 99%, identical to the amino acid sequence of SEQ ID NO: 1018. In several embodiments, the disulfide-bridge containing linker between the HLA-G and mature B2M domains is at least about 85%, at least about 90%, at least about 94%, at least about 95%, at least about 96%, at least about 97%, at least about 98%, or at least about 99%, identical to the amino acid sequence of SEQ ID NO: 1007. In several embodiments, the remainder of the construct remains the same as described above, e.g., an HLA-G peptide (amino acids 3-11 of HLA-G; at least about 85%, at least about 90%, at least about 94%, at least about 95%, at least about 96%, at least about 97%, at least about 98%, or at least about 99%, identical to SEQ ID NO: 1005), a mature B2M domain (at least about 85%, at least about 90%, at least about 94%, at least about 95%, at least about 96%, at least about 97%, at least about 98%, or at least about 99%, identical to SEQ ID NO: 1011), a disulfide-bridge containing linker (e.g., a GS linker comprising at least two cysteine residues; at least about 85%, at least about 90%, at least about 94%, at least about 95%, at least about 96%, at least about 97%, at least about 98%, or at least about 99%, identical to SEQ ID NO: 1009), and a mature HLA-E domain (at least about 85%, at least about 90%, at least about 94%, at least about 95%, at least about 96%, at least about 97%, at least about 98%, or at least about 99%, identical to SEQ ID NO: 1013). In several embodiments, the HLA-E (PBL15) is encoded by a polynucleotide that encodes an amino acid sequence comprising SEQ ID NO: 1016, (SRSVALAVLALLSLSGLEAVMAPRTLFLGCGASGGGGSGGGGSIQRTPKIQVYSRHPAENGKSNFLNCYVS GFHPSDIEVDLLKNGERIEKVEHSDLSFSKDWSFYLLYYTEFTPTEKDEYACRVNHVTLSQPKIVKWDRDM GGGGSGGGGSGGGGSGGGGSGSHSLKYFHTSVSRPGRGEPRFISVGYVDDTQFVRFDNDAASPRMVPRAP WMEQEGSEYWDRETRSARDTAQIFRVNLRTLRGCYNQSEAGSHTLQWMHGCELGPDGRFLRGYEQFAYD GKDYLTLNEDLRSWTAVDTAAQISEQKSNDASEAEHQRAYLEDTCVEWLHKYLEKGKETLLHLEPPKTHV THHPISDHEATLRCWALGFYPAEITLTWQQDGEGHTQDTELVETRPAGDGTFQKWAAVVVPSGEEQRYTC HVQHEGLPEPVTLRWKPASQPTIPIVGIIAGLVLLGSVVSGAVVAAVIWRKKSSGGKGGSYSKAEWSDSAQ GSESHSL), (e.g. SEQ ID NO: 999). In several embodiments, the amino acid sequence shares at least about 90%, at least about 94%, at least about 95%, at least about 96%, at least about 97%, at least about 98%, or at least about 99%, sequence identity, homology and/or functional equivalence with SEQ ID NO: 999.

[0385] In several embodiments, the PBL15(G2C) linker between the HLA-G and mature B2M domains is encoded by a nucleic acid that is at least about 85%, at least about 90%, at least about 94%, at least about 95%, at least about 96%, at least about 97%, at least about 98%, or at least about 99%, identical to SEQ ID NO: 1006. In several embodiments, the remainder of the immunosuppressive construct is encoded by the polynucleotides as described above, e.g., the HLA-G peptide is encoded by a nucleic acid that is at least about 85%, at least about 90%, at least about 94%, at least about 95%, at least about 96%, at least about 97%, at least about 98%, or at least about 99%, identical to SEQ ID NO: 1004, the mature B2M is encoded by a nucleic acid that is at least about 85%, at least about 90%, at least about 94%, at least about 95%, at least about 96%, at least about 97%, at least about 98%, or at least about 99%, identical to SEQ ID NO: 1010, the disulfide-bridge continaing linker (between the mature B2M and HLA-E domains) is encoded by a nucleic acid that is at least about 85%, at least about 90%, at least about 94%, at least about 95%, at least about 96%, at least about 97%, at least about 98%, or at least about 99%, identical to SEQ ID NO: 1008, and a mature HLA-e domain is encoded by a nucleic acid that is at least about 85%, at least about 90%, at least about 94%, at least about 95%, at least about 96%, at least about 97%, at least about 98%, or at least about 99%, identical to SEQ ID NO: 1012. In several embodiments, the polynucleotide encoding the HLA-E (PBL15) immunosuppressive construct comprises SEQ ID NO: 1000 or shares at least about 80%, at least about 85%, at least about 90%, at least about 94%, at least about 95%, at least about 96%, at least about 97%, at least about 98%, or at least about 99%, sequence identity with SEQ ID NO: 1000. Optionally, the polynucleotide encodes a detectable tag (e.g., a FLAG tag) and/or can comprise an internal ribosome entry site (IRES) that allows for expression of an additional protein, such as a detectable tag (e.g., GFP).

[0386] In several embodiments, immunosuppressive constructs wherein HLA is re-expressed allow for inhibition of, for example, NK cell-based elimination of B2M deficient T-cells in a mixed NK+T cell population. See, for example, International Patent Application No. PCT/US2021/072715, filed Dec. 2, 2021, the entirety of which is incorporated by reference herein.

### Chimeric Receptors

### Extracellular Domains (Tumor Binder)

[0387] Some embodiments of the compositions and methods described herein relate to a chimeric antigen receptor that includes an extracellular domain that comprises a tumor-binding domain (also referred to as an antigen-binding protein or antigen-binding domain) as described herein. The tumor binding domain, depending on the embodiment, targets, for example CD19, CD123, CD70, Her2, mesothelin, Claudin 6, BCMA, EGFR, among others. Several embodiments of the compositions and methods described herein relate to a chimeric receptor that includes an extracellular domain that comprises a ligand binding domain that binds a ligand expressed by a tumor cell (also referred to as an activating chimeric receptor) as described herein. In some embodiments, the ligand binding domain binds to a ligand of NKG2D. The ligand binding domain, depending on the embodiment, targets for example MICA, MICB, ULBP1, ULBP2, ULBP3, ULBP4, ULBP5, and ULBP6 (among others).

[0388] In some embodiments, the antigen-binding domain is derived from or comprises wild-type or non-wild-type sequence of an antibody, an antibody fragment, an scFv, a Fv, a Fab, a (Fab′)₂, a single domain antibody (sdAb), a vH or vL domain, a camelid VHH domain, or a non-immunoglobulin scaffold such as a DARPIN, an affibody, an affilin, an adnectin, an affitin, a repebody, a fynomer, an alphabody, an avimer, an atrimer, a centyrin, a pronectin, an anticalin, a kunitz domain, an Armadillo repeat protein, an autoantigen, a receptor or a ligand. In some embodiments, the tumor-binding domain contains more than one antigen binding domain. In embodiments, the antigen-binding domain is operably linked directly or via an optional linker to the NH2-terminal end of a TCR domain (e.g., constant chains of TCR-alpha, TCR-beta1, TCR-beta2, preTCR-alpha, pre-TCR-alpha-Del48, TCR-gamma, or TCR-delta).

a. Antigen-Binding Proteins

[0389] There are provided, in several embodiments, antigen-binding proteins. As used herein, the term “antigen-binding protein” shall be given its ordinary meaning, and shall also refer to a protein comprising an antigen-binding fragment that binds to an antigen and, optionally, a scaffold or framework portion that allows the antigen-binding fragment to adopt a conformation that promotes binding of the antigen-binding protein to the antigen. In some embodiments, the antigen is a cancer antigen (e.g., CD19) or a fragment thereof. In some embodiments, the antigen-binding fragment comprises at least one CDR from an antibody that binds to the antigen. In some embodiments, the antigen-binding fragment comprises all three CDRs from the heavy chain of an antibody that binds to the antigen or from the light chain of an antibody that binds to the antigen. In still some embodiments, the antigen-binding fragment comprises all six CDRs from an antibody that binds to the antigen (three from the heavy chain and three from the light chain). In several embodiments, the antigen-binding fragment comprises one, two, three, four, five, or six CDRs from an antibody that binds to the antigen, and in several embodiments, the CDRs can be any combination of heavy and/or light chain CDRs. The antigen-binding fragment in some embodiments is an antibody fragment.

[0390] Nonlimiting examples of antigen-binding proteins include antibodies, antibody fragments (e.g., an antigen-binding fragment of an antibody), antibody derivatives, and antibody analogs. Further specific examples include, but are not limited to, a single-chain variable fragment (scFv), a nanobody (e.g., VH domain of camelid heavy chain antibodies; VHH fragment), a Fab fragment, a Fab′ fragment, a F(ab′)₂ fragment, a Fv fragment, a Fd fragment, and a complementarity determining region (CDR) fragment. These molecules can be derived from any mammalian source, such as human, mouse, rat, rabbit, or pig, dog, or camelid. Antibody fragments may compete for binding of a target antigen with an intact (e.g., native) antibody and the fragments may be produced by the modification of intact antibodies (e.g., enzymatic or chemical cleavage) or synthesized de novo using recombinant DNA technologies or peptide synthesis. The antigen-binding protein can comprise, for example, an alternative protein scaffold or artificial scaffold with grafted CDRs or CDR derivatives. Such scaffolds include, but are not limited to, antibody-derived scaffolds comprising mutations introduced to, for example, stabilize the three-dimensional structure of the antigen-binding protein as well as wholly synthetic scaffolds comprising, for example, a biocompatible polymer. In addition, peptide antibody mimetics (“PAMs”) can be used, as well as scaffolds based on antibody mimetics utilizing fibronectin components as a scaffold.

[0391] In some embodiments, the antigen-binding protein comprises one or more antibody fragments incorporated into a single polypeptide chain or into multiple polypeptide chains. For instance, antigen-binding proteins can include, but are not limited to, a diabody; an intrabody; a domain antibody (single VL or VH domain or two or more VH domains joined by a peptide linker;); a maxibody (2 scFvs fused to Fc region); a triabody; a tetrabody; a minibody (scFv fused to CH3 domain); a peptibody (one or more peptides attached to an Fc region); a linear antibody (a pair of tandem Fd segments (VH-CH1-VH-CH1) which, together with complementary light chain polypeptides, form a pair of antigen binding regions); a small modular immunopharmaceutical; and immunoglobulin fusion proteins (e.g. IgG-scFv, IgG-Fab, 2scFv-IgG, 4scFv-IgG, VH-IgG, IgG-VH, and Fab-scFv-Fc).

[0392] In some embodiments, the antigen-binding protein has the structure of an immunoglobulin. As used herein, the term “immunoglobulin” shall be given its ordinary meaning, and shall also refer to a tetrameric molecule, with each tetramer comprising two identical pairs of polypeptide chains, each pair having one “light” (about 25 kDa) and one “heavy” chain (about 50-70 kDa). The amino-terminal portion of each chain includes a variable region of about 100 to 110 or more amino acids primarily responsible for antigen recognition. The carboxy-terminal portion of each chain defines a constant region primarily responsible for effector function.

[0393] Within light and heavy chains, the variable (V) and constant regions (C) are joined by a “J” region of about 12 or more amino acids, with the heavy chain also including a “D” region of about 10 more amino acids. The variable regions of each light/heavy chain pair form the antibody binding site such that an intact immunoglobulin has two binding sites.

[0394] Immunoglobulin chains exhibit the same general structure of relatively conserved framework regions (FR) joined by three hypervariable regions, also called complementarity determining regions or CDRs. From N-terminus to C-terminus, both light and heavy chains comprise the domains FR1, CDR1, FR2, CDR2, FR3, CDR3 and FR4.

[0395] Human light chains are classified as kappa and lambda light chains. An antibody “light chain”, refers to the smaller of the two types of polypeptide chains present in antibody molecules in their naturally occurring conformations. Kappa (K) and lambda (k) light chains refer to the two major antibody light chain isotypes. A light chain may include a polypeptide comprising, from amino terminus to carboxyl terminus, a single immunoglobulin light chain variable region (VL) and a single immunoglobulin light chain constant domain (CL).

[0396] Heavy chains are classified as mu (μ), delta (Δ), gamma (γ), alpha (α), and epsilon (ε), and define the antibody's isotype as IgM, IgD, IgG, IgA, and IgE, respectively. An antibody “heavy chain” refers to the larger of the two types of polypeptide chains present in antibody molecules in their naturally occurring conformations, and which normally determines the class to which the antibody belongs. A heavy chain may include a polypeptide comprising, from amino terminus to carboxyl terminus, a single immunoglobulin heavy chain variable region (VH), an immunoglobulin heavy chain constant domain 1 (CH1), an immunoglobulin hinge region, an immunoglobulin heavy chain constant domain 2 (CH2), an immunoglobulin heavy chain constant domain 3 (CH3), and optionally an immunoglobulin heavy chain constant domain 4 (CH4). In some embodiments, the CAR/scFv comprises a VH domain comprising the CDR-H1, CDR-H2, and CDR-H3 of any VH domain sequence provided herein, and a VL domain comprising the CDR-L1, CRD-L2, and CDR-L3 of any VL domain sequence provided herein.

[0397] The IgG-class is further divided into subclasses, namely, IgG1, IgG2, IgG3, and IgG4. The IgA-class is further divided into subclasses, namely IgA1 and IgA2. The IgM has subclasses including, but not limited to, IgM1 and IgM2. The heavy chains in IgG, IgA, and IgD antibodies have three domains (CH1, CH2, and CH3), whereas the heavy chains in IgM and IgE antibodies have four domains (CH1, CH2, CH3, and CH4). The immunoglobulin heavy chain constant domains can be from any immunoglobulin isotype, including subtypes. The antibody chains are linked together via inter-polypeptide disulfide bonds between the CL domain and the CH1 domain (e.g., between the light and heavy chain) and between the hinge regions of the antibody heavy chains.

[0398] In some embodiments, the antigen-binding protein is an antibody. The term “antibody”, as used herein, refers to a protein, or polypeptide sequence derived from an immunoglobulin molecule which specifically binds with an antigen. Antibodies can be monoclonal, or polyclonal, multiple or single chain, or intact immunoglobulins, and may be derived from natural sources or from recombinant sources. Antibodies can be tetramers of immunoglobulin molecules. The antibody may be “humanized”, “chimeric” or non-human. An antibody may include an intact immunoglobulin of any isotype, and includes, for instance, chimeric, humanized, human, and bispecific antibodies. An intact antibody will generally comprise at least two full-length heavy chains and two full-length light chains. Antibody sequences can be derived solely from a single species, or can be “chimeric,” that is, different portions of the antibody can be derived from two different species as described further below. Unless otherwise indicated, the term “antibody” also includes antibodies comprising two substantially full-length heavy chains and two substantially full-length light chains provided the antibodies retain the same or similar binding and/or function as the antibody comprised of two full length light and heavy chains. For example, antibodies having 1, 2, 3, 4, or 5 amino acid residue substitutions, insertions or deletions at the N-terminus and/or C-terminus of the heavy and/or light chains are included in the definition provided that the antibodies retain the same or similar binding and/or function as the antibodies comprising two full length heavy chains and two full length light chains. Examples of antibodies include monoclonal antibodies, polyclonal antibodies, chimeric antibodies, humanized antibodies, human antibodies, bispecific antibodies, and synthetic antibodies. There is provided, in some embodiments, monoclonal and polyclonal antibodies. As used herein, the term “polyclonal antibody” shall be given its ordinary meaning, and shall also refer to a population of antibodies that are typically widely varied in composition and binding specificity. As used herein, the term “monoclonal antibody” (“mAb”) shall be given its ordinary meaning, and shall also refer to one or more of a population of antibodies having identical sequences. Monoclonal antibodies bind to the antigen at a particular epitope on the antigen.

[0399] In some embodiments, the antigen-binding protein is a fragment or antigen-binding fragment of an antibody. The term “antibody fragment” refers to at least one portion of an antibody, that retains the ability to specifically interact with (e.g., by binding, steric hindrance, stabilizing/destabilizing, spatial distribution) an epitope of an antigen. Examples of antibody fragments include, but are not limited to, Fab, Fab′, F(ab′)2, Fv fragments, scFv antibody fragments, disulfide-linked Fvs (sdFv), a Fd fragment consisting of the VH and CH1 domains, linear antibodies, single domain antibodies such as sdAb (either vL or vH), camelid vHH domains, multi-specific antibodies formed from antibody fragments such as a bivalent fragment comprising two Fab fragments linked by a disulfide bridge at the hinge region, and an isolated CDR or other epitope binding fragments of an antibody. An antigen binding fragment can also be incorporated into single domain antibodies, maxibodies, minibodies, nanobodies, intrabodies, diabodies, triabodies, tetrabodies, v-NAR and bis-scFv (see, e.g., Hollinger and Hudson, Nature Biotechnology 23: 1126-1136, 2005). Antigen binding fragments can also be grafted into scaffolds based on polypeptides such as a fibronectin type III (Fn3)(see U.S. Pat. No. 6,703,199, which describes fibronectin polypeptide mini bodies). An antibody fragment may include a Fab, Fab′, F(ab′)₂, and/or Fv fragment that contains at least one CDR of an immunoglobulin that is sufficient to confer specific antigen binding to a cancer antigen (e.g., CD19). Antibody fragments may be produced by recombinant DNA techniques or by enzymatic or chemical cleavage of intact antibodies.

[0400] In some embodiments, Fab fragments are provided. A Fab fragment is a monovalent fragment having the VL, VH, CL and CH1 domains; a F(ab′)2 fragment is a bivalent fragment having two Fab fragments linked by a disulfide bridge at the hinge region; a Fd fragment has the VH and CH1 domains; an Fv fragment has the VL and VH domains of a single arm of an antibody; and a dAb fragment has a VH domain, a VL domain, or an antigen-binding fragment of a VH or VL domain. In some embodiments, these antibody fragments can be incorporated into single domain antibodies, single-chain antibodies, maxibodies, minibodies, intrabodies, diabodies, triabodies, tetrabodies, v-NAR and bis-scFv. In some embodiments, the antibodies comprise at least one CDR as described herein.

[0401] There is also provided for herein, in several embodiments, single-chain variable fragments. As used herein, the term “single-chain variable fragment” (“scFv”) shall be given its ordinary meaning, and shall also refer to a fusion protein in which a VL and a VH region are joined via a linker (e.g., a synthetic sequence of amino acid residues) to form a continuous protein chain wherein the linker is long enough to allow the protein chain to fold back on itself and form a monovalent antigen binding site). For the sake of clarity, unless otherwise indicated as such, a “single-chain variable fragment” is not an antibody or an antibody fragment as defined herein. Diabodies are bivalent antibodies comprising two polypeptide chains, wherein each polypeptide chain comprises VH and VL domains joined by a linker that is configured to reduce or not allow for pairing between two domains on the same chain, thus allowing each domain to pair with a complementary domain on another polypeptide chain. According to several embodiments, if the two polypeptide chains of a diabody are identical, then a diabody resulting from their pairing will have two identical antigen binding sites. Polypeptide chains having different sequences can be used to make a diabody with two different antigen binding sites. Similarly, tribodies and tetrabodies are antibodies comprising three and four polypeptide chains, respectively, and forming three and four antigen binding sites, respectively, which can be the same or different.

[0402] In several embodiments, the antigen-binding protein comprises one or more CDRs. As used herein, the term “CDR” shall be given its ordinary meaning, and shall also refer to the complementarity determining region (also termed “minimal recognition units” or “hypervariable region”) within antibody variable sequences. The CDRs permit the antigen-binding protein to specifically bind to a particular antigen of interest. There are three heavy chain variable region CDRs (CDRH1, CDRH2 and CDRH3) and three light chain variable region CDRs (CDRL1, CDRL2 and CDRL3). The CDRs in each of the two chains typically are aligned by the framework regions to form a structure that binds specifically to a specific epitope or domain on the target protein. From N-terminus to C-terminus, naturally-occurring light and heavy chain variable regions both typically conform to the following order of these elements: FR1, CDR1, FR2, CDR2, FR3, CDR3 and FR4. A numbering system has been devised for assigning numbers to amino acids that occupy positions in each of these domains. This numbering system is defined in Kabat Sequences of Proteins of Immunological Interest (1987 and 1991, NIH, Bethesda, MD), or Chothia & Lesk, 1987, J. Mol. Biol. 196:901-917; Chothia et al., 1989, Nature 342: 878-883. Complementarity determining regions (CDRs) and framework regions (FR) of a given antibody may be identified using this system. Other numbering systems for the amino acids in immunoglobulin chains include IMGT® (the international ImMunoGeneTics information system; Lefranc et al, Dev. Comp. Immunol. 29: 185-203; 2005) and AHo (Honegger and Pluckthun, J. Mol. Biol. 309(3): 657-670; 2001). One or more CDRs may be incorporated into a molecule either covalently or noncovalently to make it an antigen-binding protein.

[0403] In some embodiments, the antigen-binding proteins provided herein comprise one or more CDR(s) as part of a larger polypeptide chain. In some embodiments, the antigen-binding proteins covalently link the one or more CDR(s) to another polypeptide chain. In some embodiments, the antigen-binding proteins incorporate the one or more CDR(s) noncovalently. In some embodiments, the antigen-binding proteins may comprise at least one of the CDRs described herein incorporated into a biocompatible framework structure. In some embodiments, the biocompatible framework structure comprises a polypeptide or portion thereof that is sufficient to form a conformationally stable structural support, or framework, or scaffold, which is able to display one or more sequences of amino acids that bind to an antigen (e.g., CDRs, a variable region, etc.) in a localized surface region. Such structures can be a naturally occurring polypeptide or polypeptide “fold” (a structural motif), or can have one or more modifications, such as additions, deletions and/or substitutions of amino acids, relative to a naturally occurring polypeptide or fold. Depending on the embodiment, the scaffolds can be derived from a polypeptide of a variety of different species (or of more than one species), such as a human, a non-human primate or other mammal, other vertebrate, invertebrate, plant, bacteria or virus.

[0404] Depending on the embodiment, the biocompatible framework structures are based on protein scaffolds or skeletons other than immunoglobulin domains. In some such embodiments, those framework structures are based on fibronectin, ankyrin, lipocalin, neocarzinostain, cytochrome b, CP1 zinc finger, PST1, coiled coil, LACI-D1, Z domain and/or tendamistat domains.

[0405] There is also provided, in some embodiments, antigen-binding proteins with more than one binding site. In several embodiments, the binding sites are identical to one another while in some embodiments the binding sites are different from one another. For example, an antibody typically has two identical binding sites, while a “bispecific” or “bifunctional” antibody has two different binding sites. The two binding sites of a bispecific antigen-binding protein or antibody will bind to two different epitopes, which can reside on the same or different protein targets. In several embodiments, this is particularly advantageous, as a bispecific chimeric antigen receptor can impart to an engineered cell the ability to target multiple tumor markers. For example, CD19 and an additional tumor marker, such as CD123, CD70, Her2, mesothelin, Claudin 6, BCMA, EGFR, MICA, MICB, ULBP1, ULBP2, ULBP3, ULBP4, ULBP5, and ULBP6, among others, or any other marker disclosed herein or appreciated in the art as a tumor specific antigen or tumor associated antigen can be bound by a bispecific antibody.

[0406] As used herein, the term “chimeric antibody” shall be given its ordinary meaning, and shall also refer to an antibody that contains one or more regions from one antibody and one or more regions from one or more other antibodies. In some embodiments, one or more of the CDRs are derived from an anti-cancer antigen (e.g., CD19, CD123, CD70, Her2, mesothelin, PD-L1, Claudin 6, BCMA, EGFR, etc.) antibody. In several embodiments, all of the CDRs are derived from an anti-cancer antigen antibody (such as an anti-CD19 antibody). In some embodiments, the CDRs from more than one anti-cancer antigen antibodies are mixed and matched in a chimeric antibody. For instance, a chimeric antibody may comprise a CDR1 from the light chain of a first anti-cancer antigen antibody, a CDR2 and a CDR3 from the light chain of a second anti-cancer antigen antibody, and the CDRs from the heavy chain from a third anti-cancer antigen antibody. Further, the framework regions of antigen-binding proteins disclosed herein may be derived from one of the same anti-cancer antigen (e.g., CD19, CD123, CD70, Her2, mesothelin, Claudin 6, BCMA, EGFR, etc.) antibodies, from one or more different antibodies, such as a human antibody, or from a humanized antibody. In one example of a chimeric antibody, a portion of the heavy and/or light chain is identical with, homologous to, or derived from an antibody from a particular species or belonging to a particular antibody class or subclass, while the remainder of the chain(s) is/are identical with, homologous to, or derived from an antibody or antibodies from another species or belonging to another antibody class or subclass. In some embodiments, an antigen-binding domain comprises a heavy chain variable region (VH) and a light chain variable region (VL), wherein the VH comprises the CDR-H1, the CDR-H2, and the CDR-H3 as comprised within any of the VH regions provided herein, and the VL comprises the CDR-L1, the CDR-L2, and the CDR-L3 comprised within any of the VL regions provided herein.

[0407] Also provided herein are fragments of such antibodies that exhibit the desired biological activity.

### CD38

[0408] In several embodiments, an antigen binding protein is directed against CD38 (also known as ADP-ribosyl cyclase 1, cADPr hydrolase 1, Cyclic ADP-ribose hydrolase 1, or T10).

[0409] According to one embodiment, the CD38 antigen binding protein is an antigen binding domain of a CAR which comprises a transmembrane domain, a signaling domain, and optionally a co-stimulatory domain as disclosed herein. In several embodiments, the antigen binding protein binds to an epitope of the human CD38, and in particular to an epitope of the extracellular domain of the human CD38.

[0410] In several embodiments, the CD38 binding protein comprises an scFv comprising a light chain variable region (vL domain) and a heavy chain variable region (vH domain). In several embodiments, the vH domain comprises a complementarity-determining region 1 (CDR-H1), a CDR-H2, and a CDR-H3. In several embodiments, the vL domain comprises a complementarity-determining region 1 (CDR-L1), a CDR-L2, and a CDR-L3. In several embodiments, the anti-CD38 binding protein comprises at least one CDR from SEQ ID NO: 526-531 or a CDR having at least about 95%, at least about 96%, at least about 97%, at least about 98%, or at least about 99%, sequence identity, homology and/or functional equivalence to any of SEQ ID NO: 526-531. In several embodiments, the anti-CD38 vH domain comprises the sequence of SEQ ID NO: 524, or an amino acid sequence with at least about 80%, at least about 85%, at least about 90%, at least about 94%, at least about 95%, at least about 96%, at least about 97%, at least about 98%, or at least about 99%, sequence identity, homology and/or functional equivalence to SEQ ID NO: 524. In several embodiments, the anti-CD38 vH domain comprises the sequence of SEQ ID NO: 524. In some embodiments, the vH comprises a CDR-H1, a CDR-H2, and a CDR-H3 as comprised in the sequence set forth in SEQ ID NO:524. In several embodiments, the anti-CD38 vL domain comprises the sequence of SEQ ID NO: 523, or an amino acid sequence with at least about 80%, at least about 85%, at least about 90%, at least about 94%, at least about 95%, at least about 96%, at least about 97%, at least about 98%, or at least about 99%, sequence identity, homology and/or functional equivalence to SEQ ID NO: 523. In several embodiments, the anti-CD38 VL domain comprises the sequence of SEQ ID NO: 523. In some embodiments, the vL comprises a CDR-L1, a CDR-L2, and a CDR-L3 as comprised in the sequence set forth in SEQ ID NO:523. In several embodiments, the anti-CD38 binding protein is an scFv that comprises the sequence of SEQ ID NO: 532, or an amino acid sequence with at least about 80%, at least about 85%, at least about 90%, at least about 94%, at least about 95%, at least about 96%, at least about 97%, at least about 98%, or at least about 99%, sequence identity, homology and/or functional equivalence to SEQ ID NO: 532. In several embodiments, the scFv comprises the sequence of SEQ ID NO: 532. In several embodiments, the anti-CD38 CAR comprises the sequence of SEQ ID NO: 525, or an amino acid sequence with at least about 80%, at least about 85%, at least about 90%, at least about 94%, at least about 95%, at least about 96%, at least about 97%, at least about 98%, or at least about 99%, sequence identity, homology and/or functional equivalence to SEQ ID NO: 525. In several embodiments, the CAR comprises the sequence of SEQ ID NO: 532. In several embodiments, the antigen binding protein is affinity matured to enhance binding to CD38. In several embodiments, the nucleotide sequence encoding the antigen binding protein is codon-optimized to enhance expression and/or stability of the protein.

### GPRC5D

[0411] In several embodiments, an antigen binding protein is directed against GPRC5D. According to one embodiment, the GPRC5D antigen binding protein is an antigen binding domain of a CAR which comprises a transmembrane domain, a signaling domain, and optionally a co-stimulatory domain as disclosed herein. In several embodiments, the antigen binding protein binds to an epitope of the human GPRC5D. In several embodiments, the GPRC5D antigen binding domain is an scFv comprising the amino acid sequence of any one of SEQ ID NOs: 621-630, or an amino acid sequence with at least about 80%, at least about 85%, at least about 90%, at least about 94%, at least about 95%, at least about 96%, at least about 97%, at least about 98%, or at least about 99%, sequence identity, homology and/or functional equivalence to any of SEQ ID NOs:621-630. In several embodiments, the GPRCSD antigen binding domain is an scFv comprising the amino acid sequence of any one of SEQ ID NOs: 621-630. In several embodiments, the GPRCSD antigen binding domain comprises the amino acid sequence of SEQ ID NO:621. In several embodiments, the GPRCSD antigen binding domain comprises the amino acid sequence of SEQ ID NO:622. In several embodiments, the GPRCSD antigen binding domain comprises the amino acid sequence of SEQ ID NO:623. In several embodiments, the GPRCSD antigen binding domain comprises the amino acid sequence of SEQ ID NO:624. In several embodiments, the GPRCSD antigen binding domain comprises the amino acid sequence of SEQ ID NO:625. In several embodiments, the GPRCSD antigen binding domain comprises the amino acid sequence of SEQ ID NO:626. In several embodiments, the GPRCSD antigen binding domain comprises the amino acid sequence of SEQ ID NO:627. In several embodiments, the GPRCSD antigen binding domain comprises the amino acid sequence of SEQ ID NO:628. In several embodiments, the GPRCSD antigen binding domain comprises the amino acid sequence of SEQ ID NO:629. In several embodiments, the GPRCSD antigen binding domain comprises the amino acid sequence of SEQ ID NO:630. In several embodiments, the GPRCSD antigen binding domain comprises the amino acid sequence of SEQ ID NO:631. In several embodiments, the antigen binding protein is affinity matured to enhance binding to GPRCSD. In several embodiments, the nucleotide sequence encoding the antigen binding protein is codon-optimized to enhance expression and/or stability of the protein.

### CD138

[0412] In several embodiments, an antigen binding protein is directed against CD138. In several embodiments, the anti-CD138 binding protein comprises a vL and/or vH chain. In several embodiments, the anti-CD138 binding protein comprises a vL and a vH. In several embodiments, the vH domain comprises a complementarity-determining region 1 (CDR-H1), a CDR-H2, and a CDR-H3. In several embodiments, the vL domain comprises a complementarity-determining region 1 (CDR-L1), a CDR-L2, and a CDR-L3. In several embodiments, the anti-CD138 binding protein comprises at least one CDR from SEQ ID NO: 536-541 or a CDR having at least about 95%, at least about 96%, at least about 97%, at least about 98%, or at least about 99%, sequence identity, homology and/or functional equivalence to any of SEQ ID NO: 536-541. In several embodiments, the vH chain comprises the amino acid sequence of SEQ ID NO: 534, or an amino acid sequence with at least about 80%, at least about 85%, at least about 90%, at least about 94%, at least about 95%, at least about 96%, at least about 97%, at least about 98%, or at least about 99%, sequence identity, homology and/or functional equivalence to SEQ ID NO: 534. In several embodiments, the vH comprises the amino acid sequence of SEQ ID NO: 534. In some embodiments, the VH comprises a CDR-H1, a CDR-H2, and a CDR-H3 as comprised in SEQ ID NO:534. In several embodiments, the vL chain comprises the amino acid sequence of SEQ ID NO: 533, or an amino acid sequence with at least about 80%, at least about 85%, at least about 90%, at least about 94%, at least about 95%, at least about 96%, at least about 97%, at least about 98%, or at least about 99%, sequence identity, homology and/or functional equivalence to SEQ ID NO: 533. In several embodiments, the vL chain comprises the amino acid sequence of SEQ ID NO: 533. In some embodiments, the VL comprises a CDR-L1, a CDR-L2, and a CDR-L 3 as comprised in SEQ ID NO:533. In several embodiments, the anti-CD138 binding domain comprises a single-chain variable fragment (scFv). In several embodiments, the scFv comprises a linker between the vH and vL domains. In several embodiments, the anti-CD138 binding protein is an scFv comprising the amino acid sequence of SEQ ID NO: 542, or an amino acid sequence with at least about 80%, at least about 85%, at least about 90%, at least about 94%, at least about 95%, at least about 96%, at least about 97%, at least about 98%, or at least about 99%, sequence identity, homology and/or functional equivalence to SEQ ID NO: 542. In several embodiments, the scFv comprises the amino acid sequence of SEQ ID NO: 542. In several embodiments, the anti-CD138 binding protein is integrated into a CAR which comprises a transmembrane domain, a signaling domain, and optionally a co-stimulatory domain as disclosed herein comprising the amino acid sequence of SEQ ID NO: 535 or 543, or an amino acid sequence with at least about 80%, at least about 85%, at least about 90%, at least about 94%, at least about 95%, at least about 96%, at least about 97%, at least about 98%, or at least about 99%, sequence identity, homology and/or functional equivalence to SEQ ID NO: 535 or 543. In several embodiments, the CAR comprises the amino acid sequence of SEQ ID NO: 535. In several embodiments, the CAR comprises the amino acid sequence of SEQ ID NO:543. In several embodiments, the antigen binding protein is affinity matured to enhance binding to CD138. In several embodiments, the nucleotide sequence encoding the antigen binding protein is codon-optimized to enhance expression and/or stability of the protein.

### DLL3

[0413] In several embodiments, an antigen binding protein is directed against DLL3. In several embodiments, the anti-DLL3 binding protein is an antigen binding domain of a CAR which comprises a transmembrane domain, a signaling domain, and optionally a co-stimulatory domain as disclosed herein. In several embodiments, the anti-CD138 binding protein comprises a vL and a vH. In several embodiments, the vH domain comprises a complementarity-determining region 1 (CDR-H1), a CDR-H2, and a CDR-H3. In several embodiments, the vL domain comprises a complementarity-determining region 1 (CDR-L1), a CDR-L2, and a CDR-L3. In several embodiments, the anti-DLL3 antigen binding protein comprises a vH chain comprising the amino acid sequence of any of SEQ ID NOs: 570-581, or a sequence having at least about 95%, at least about 96%, at least about 97%, at least about 98%, or at least about 99%, sequence identity, homology and/or functional equivalence to any of SEQ ID NO: 570-581. In several embodiments, the anti-DLL3 antigen binding protein comprises a vH chain comprising the amino acid sequence of any of SEQ ID NOs: 570-581. In several embodiments, the anti-DLL3 antigen binding protein comprises a vL chain comprising the amino acid sequence of any of SEQ ID NOs: 582-593, or a sequence having at least about 95%, at least about 96%, at least about 97%, at least about 98%, or at least about 99%, sequence identity, homology and/or functional equivalence to any of SEQ ID NO: 582-593. In several embodiments, the anti-DLL3 antigen binding protein comprises a vL chain comprising the amino acid sequence of any of SEQ ID NOs: 582-593. In several embodiments, the anti-DLL3 binding protein comprises a polypeptide that targets DLL3 and comprises the amino acid sequence of any of SEQ ID NO: 594-595, or a sequence having at least about 95%, at least about 96%, at least about 97%, at least about 98%, or at least about 99%, sequence identity, homology and/or functional equivalence to any of SEQ ID NO: 594-595. In some embodiments, the anti-DLL3 binding protein comprises a polypeptide that targets DLL3 and comprises the amino acid sequence of SEQ ID NO:594. In some embodiments, the anti-DLL3 binding protein comprises a polypeptide that targets DLL3 and comprises the amino acid sequence of SEQ ID NO:595. In several embodiments, the anti-DLL3 binding protein comprises an scFv. In several embodiments, the anti-DLL3 binding protein comprises an scFv comprising the sequence of any of SEQ ID NO: 596-599, or a sequence having at least about 95%, at least about 96%, at least about 97%, at least about 98%, or at least about 99%, sequence identity, homology and/or functional equivalence to any of SEQ ID NO: 596-599. In several embodiments, the scFv comprises the sequence of any of SEQ ID NO: 596-599. In several embodiments, the scFv comprises the sequence of SEQ ID NO:596. In several embodiments, the scFv comprises the sequence of SEQ ID NO:597. In several embodiments, the scFv comprises the sequence of SEQ ID NO:598. In several embodiments, the scFv comprises the sequence of SEQ ID NO:599. In several embodiments, the antigen binding protein is affinity matured to enhance binding to DLL3. In several embodiments, the nucleotide sequence encoding the antigen binding protein is codon-optimized to enhance expression and/or stability of the protein.

### EGFR

[0414] In several embodiments, an antigen binding protein is directed against the epidermal growth factor receptor EGFR. In several embodiments, the anti-EGFR binding protein is an antigen binding domain of a CAR which comprises a transmembrane domain, a signaling domain, and optionally a co-stimulatory domain as disclosed herein. In several embodiments, the anti-EGFR binding protein comprises a vH chain comprising the amino acid sequence of any of SEQ ID NO: 600, 606-607, or a sequence having at least about 95%, at least about 96%, at least about 97%, at least about 98%, or at least about 99%, sequence identity, homology and/or functional equivalence to any of SEQ ID NO: 600, 606-607. In several embodiments, the vH comprises the amino acid sequence SEQ ID NO:600, 606, or 607. In several embodiments, the vH comprises the amino acid sequence SEQ ID NO:600. In several embodiments, the vH comprises the amino acid sequence SEQ ID NO:606. In several embodiments, the vH comprises the amino acid sequence SEQ ID NO: 607. In several embodiments, the anti-EGFR binding protein comprises a vL chain comprising the amino acid sequence of any of SEQ ID NO: 601, 608-609, or a sequence having at least about 95%, at least about 96%, at least about 97%, at least about 98%, or at least about 99%, sequence identity, homology and/or functional equivalence to any of SEQ ID NO: 601, 608-609. In several embodiments, the vL comprises the amino acid sequence of SEQ ID NO: 601, 608, or 609. In several embodiments, the vL comprises the amino acid sequence of SEQ ID NO: 601. In several embodiments, the vL comprises the amino acid sequence of SEQ ID NO: 608. In several embodiments, the vL comprises the amino acid sequence of SEQ ID NO: 609. In several embodiments, the anti-EGFR binding protein is an scFv comprising the amino acid sequence of any of SEQ ID NOs: 610-620, or a sequence having at least about 95%, at least about 96%, at least about 97%, at least about 98%, or at least about 99%, sequence identity, homology and/or functional equivalence to any of SEQ ID NO: 610-620. In several embodiments, the scFv comprises the amino acid sequence of any of SEQ ID NOs: 610-620. In several embodiments, the anti-EGFR binding protein is incorporated into a CAR having the sequence of any of SEQ ID NOs: 602-605, or a sequence having at least about 95%, at least about 96%, at least about 97%, at least about 98%, or at least about 99%, sequence identity, homology and/or functional equivalence to any of SEQ ID NO: 602-605. In some embodiments, the CAR comprises the sequence of any one of SEQ ID NO:602-605. In some embodiments, the CAR comprises the sequence of SEQ ID NO:602. In some embodiments, the CAR comprises the sequence of SEQ ID NO:603. In some embodiments, the CAR comprises the sequence of SEQ ID NO:604. In some embodiments, the CAR comprises the sequence of SEQ ID NO:605. In several embodiments, the antigen binding protein is affinity matured to enhance binding to the EGFR. In several embodiments, the nucleotide sequence encoding the antigen binding protein is codon-optimized to enhance expression and/or stability of the protein.

### PSMA

[0415] In several embodiments, an antigen binding protein is directed against PSMA. In several embodiments, the anti-PSMA binding protein is an antigen binding domain of a CAR which comprises a transmembrane domain, a signaling domain, and optionally a co-stimulatory domain as disclosed herein. In several embodiments, the anti-PSMA binding protein comprises a vL chain comprising the amino acid sequence of SEQ ID NO: 634, or a sequence having at least about 95%, at least about 96%, at least about 97%, at least about 98%, or at least about 99%, sequence identity, homology and/or functional equivalence to SEQ ID NO: 634. In some embodiments, the vL comprises the amino acid sequence of SEQ ID NO: 634. In several embodiments, the anti-PSMA binding protein comprises a vH chain comprising the amino acid sequence of SEQ ID NO: 635, or a sequence having at least about 95%, at least about 96%, at least about 97%, at least about 98%, or at least about 99%, sequence identity, homology and/or functional equivalence to SEQ ID NO: 635. In some embodiments, the vH comprises the amino acid sequence of SEQ ID NO: 635. In several embodiments, the anti-PSMA binding protein comprises an scFv comprising the amino acid sequence of SEQ ID NO: 632 or 633, or a sequence having at least about 95%, at least about 96%, at least about 97%, at least about 98%, or at least about 99%, sequence identity, homology and/or functional equivalence to SEQ ID NO: 632 or 633. In some embodiments, the scFv comprises the amino acid sequence of SEQ ID NO:632. In some embodiments, the scFc comprises the amino acid sequence of SEQ ID NO:633. In several embodiments, the anti-PSMA binding protein comprises an antibody comprising the amino acid sequence of SEQ ID NO: 631, or a sequence having at least about 95%, at least about 96%, at least about 97%, at least about 98%, or at least about 99%, sequence identity, homology and/or functional equivalence to SEQ ID NO: 631. In some embodiments, the anti-PSMA binding protein comprises the amino acid sequence set forth in SEQ ID NO:631. In several embodiments, the antigen binding protein is affinity matured to enhance binding to PSMA. In several embodiments, the nucleotide sequence encoding the antigen binding protein is codon-optimized to enhance expression and/or stability of the protein.

### FLT3

[0416] In several embodiments, an antigen binding protein is directed against FLT3. In several embodiments, the anti-FLT3 binding protein is an antigen binding domain of a CAR which comprises a transmembrane domain, a signaling domain, and optionally a co-stimulatory domain as disclosed herein. In several embodiments, the anti-FLT3 binding protein comprises one or more CDRs from the vL and/or vH chain selected from SEQ ID NOs: 636-644, or a CDR having at least about 95%, at least about 96%, at least about 97%, at least about 98%, or at least about 99%, sequence identity, homology and/or functional equivalence to any of SEQ ID NO: 636-644. In several embodiments, the anti-FLT3 binding protein comprises a vL chain comprising the amino acid sequence of SEQ ID NO: 645, or a sequence having at least about 95%, at least about 96%, at least about 97%, at least about 98%, or at least about 99%, sequence identity, homology and/or functional equivalence to SEQ ID NO: 645. In some embodiments, the vL comprises the amino acid sequence set forth in SEQ ID NO:645. In several embodiments, the anti-FLT3 binding protein comprises a vH chain comprising the amino acid sequence of SEQ ID NO: 646, or a sequence having at least about 95%, at least about 96%, at least about 97%, at least about 98%, or at least about 99%, sequence identity, homology and/or functional equivalence to SEQ ID NO: 646. In some embodiments, the vH comprises the amino acid sequence set forth in SEQ ID NO:646. In some embodiments, the anti-KREMEN binding protein comprises a scFv. In several embodiments, the antigen binding protein is affinity matured to enhance binding to FLT3. In several embodiments, the nucleotide sequence encoding the antigen binding protein is codon-optimized to enhance expression and/or stability of the protein.

### KREMEN2

[0417] In several embodiments, an antigen binding protein is directed against KREMEN2. In several embodiments, the anti-KREMEN2 binding protein is an antigen binding domain of a CAR which comprises a transmembrane domain, a signaling domain, and optionally a co-stimulatory domain as disclosed herein. In several embodiments, the anti-KREMEN2 binding protein comprises a vL chain comprising the amino acid sequence of any of SEQ ID NOs: 647-651, or a sequence having at least about 95%, at least about 96%, at least about 97%, at least about 98%, or at least about 99%, sequence identity, homology and/or functional equivalence to any of SEQ ID NOs: 647-651. In several embodiments, the vL comprises the amino acid sequence of any of SEQ ID NOs: 647-651. In several embodiments, the anti-KREMEN2 binding protein comprises a vH chain comprising the amino acid sequence of any of SEQ ID NOs: 652-656, or a sequence having at least about 95%, at least about 96%, at least about 97%, at least about 98%, or at least about 99%, sequence identity, homology and/or functional equivalence to any of SEQ ID NOs: 652-656. In several embodiments, the vH comprises the amino acid sequence of any of SEQ ID NOs: 652-656. In some embodiments, the anti-KREMEN binding protein comprises a scFv. In several embodiments, the antigen binding protein is affinity matured to enhance binding to KREMEN2. In several embodiments, the nucleotide sequence encoding the antigen binding protein is codon-optimized to enhance expression and/or stability of the protein.

### ALPPL2

[0418] In several embodiments, an antigen binding protein is directed against ALPPL2. In several embodiments, the anti-ALPPL2 binding protein is an antigen binding domain of a CAR which comprises a transmembrane domain, a signaling domain, and optionally a co-stimulatory domain as disclosed herein. In several embodiments, the anti-ALPPL2 binding protein comprises a vL chain comprising the amino acid sequence of any of SEQ ID NOs: 657-659, or a sequence having at least about 95%, at least about 96%, at least about 97%, at least about 98%, or at least about 99%, sequence identity, homology and/or functional equivalence to any of SEQ ID NOs: 657-659. In some embodiments, the vL comprises the amino acid sequence set forth in any of SEQ ID NO:657-659. In several embodiments, the anti-ALPPL2 binding protein comprises a vH chain comprising the amino acid sequence of any of SEQ ID NOs: 660-662, or a sequence having at least about 95%, at least about 96%, at least about 97%, at least about 98%, or at least about 99%, sequence identity, homology and/or functional equivalence to any of SEQ ID NOs: 660-662. In some embodiments, the vH comprises the amino acid sequence set forth in any of SEQ ID NO:660-662. In several embodiments, the anti-ALPPL2 binding protein is an antibody, or scFv, containing one or more combinations of the vL and vH domains comprising the amino acid sequence of any of SEQ ID NOs: 657-662, or a sequence having at least about 95%, at least about 96%, at least about 97%, at least about 98%, or at least about 99%, sequence identity, homology and/or functional equivalence to any of SEQ ID NO: 657-662. In several embodiments, the anti-ALPPL2 binding protein is a scFv. In several embodiments, the antigen binding protein is affinity matured to enhance binding to ALPPL2. In several embodiments, the nucleotide sequence encoding the antigen binding protein is codon-optimized to enhance expression and/or stability of the protein.

### CLDN4

[0419] In several embodiments, an antigen binding protein is directed against CLDN4. In several embodiments, the anti-CLDN4 binding protein is an antigen binding domain of a CAR which comprises a transmembrane domain, a signaling domain, and optionally a co-stimulatory domain as disclosed herein. In several embodiments, the anti-CLDN4 binding protein comprises a vL chain comprising the amino acid sequence of any of SEQ ID NOs: 663, 664, or 667, or a sequence having at least about 95%, at least about 96%, at least about 97%, at least about 98%, or at least about 99%, sequence identity, homology and/or functional equivalence to any of SEQ ID NOs: 663, 664, or 667. In some embodiments, the vL comprises the amino acid sequence set forth in any of SEQ ID NOS:663, 664, and 667. In several embodiments, the anti-CLDN4 binding protein comprises a vH chain comprising the amino acid sequence of any of SEQ ID NOs: 665, 666, or 668, or a sequence having at least about 95%, at least about 96%, at least about 97%, at least about 98%, or at least about 99%, sequence identity, homology and/or functional equivalence to any of SEQ ID NOs: 665, 666, or 668. In some embodiments, the vH comprises the amino acid sequence set forth in any of SEQ ID NOS:665, 666, and 668. In several embodiments, the anti-CLDN4 binding protein is an antibody, or scFv, containing one or more combinations of the vL and vH domains comprising the amino acid sequence of any of SEQ ID NOs: 663-668, or a sequence having at least about 95%, at least about 96%, at least about 97%, at least about 98%, or at least about 99%, sequence identity, homology and/or functional equivalence to any of SEQ ID NOs: 663-668. In several embodiments, the anti-CLDN4 binding protein comprises an scFv. In several embodiments, the antigen binding protein is affinity matured to enhance binding to CLDN4. In several embodiments, the nucleotide sequence encoding the antigen binding protein is codon-optimized to enhance expression and/or stability of the protein. In several embodiments, the antigen binding protein binds to CLDN4, but not to other claudins.

### CLDN6

[0420] In several embodiments, an antigen binding protein is directed against CLDN6. In several embodiments, the anti-CLDN6 binding protein is an antigen binding domain of a CAR which comprises a transmembrane domain, a signaling domain, and optionally a co-stimulatory domain as disclosed herein. In several embodiments, the anti-CLDN6 binding protein comprises a vL chain comprising the amino acid sequence of any of SEQ ID NOs: 669-678, or a sequence having at least about 95%, at least about 96%, at least about 97%, at least about 98%, or at least about 99%, sequence identity, homology and/or functional equivalence to any of SEQ ID NOs: 669-678. In some embodiments, the vL comprises the amino acid sequence of any of SEQ ID NOS:669-678. In several embodiments, the anti-CLDN6 binding protein comprises a vH chain comprising the amino acid sequence of any of SEQ ID NOs: 679-682, or a sequence having at least about 95%, at least about 96%, at least about 97%, at least about 98%, or at least about 99%, sequence identity, homology and/or functional equivalence to any of SEQ ID NOs: 679-682. In some embodiments, the vH comprises the amino acid sequence of any of SEQ ID NOS:679-682. In several embodiments, the anti-CLDN6 binding protein is an antibody, or scFv, containing one or more combinations of the vL and vH domains comprising the amino acid sequence of any of SEQ ID NOs: 669-682, or a sequence having at least about 95%, at least about 96%, at least about 97%, at least about 98%, or at least about 99%, sequence identity, homology and/or functional equivalence to any of SEQ ID NOs: 669-682. In several embodiments, the anti-CLDN6 binding protein is a scFv. In several embodiments, the antigen binding protein is affinity matured to enhance binding to CLDN6. In several embodiments, the nucleotide sequence encoding the antigen binding protein is codon-optimized to enhance expression and/or stability of the protein. In several embodiments, the antigen binding protein binds to CLDN6, but not to other claudins.

[0421] Several embodiments relate to CARs that are directed to Claudin 6, and show little or no binding to Claudin 3, 4, or 9 (or other Claudins). In some embodiments, the antigen-binding protein comprises a heavy chain variable region (VH). In some embodiments, the VH comprises a CDR-H1 comprising the amino acid sequence set forth in SEQ ID NO:92, a CDR-H2 comprising the amino acid sequence set forth in SEQ ID NO:93, and a CDR-H3 comprising the amino acid sequence set forth in SEQ ID NO:94. In some embodiments, the antigen-binding protein comprises a heavy chain variable having at least 90% identity to the VH amino acid sequence set forth in SEQ ID NO: 88. In some embodiments, the antigen-binding protein comprises a heavy chain variable having at least 95% identity to the VH amino acid sequence set forth in SEQ ID NO: 88. In some embodiments, the antigen-binding protein comprises a heavy chain variable having at least 96, 97, 98, or 99% identity to the VH amino acid sequence set forth in SEQ ID NO: 88. In several embodiments, the heavy chain variable may have one or more additional mutations (e.g., for purposes of humanization) in the VH amino acid sequence set forth in SEQ ID NO: 88, but retains specific binding to a cancer antigen (e.g., CLDN6). In several embodiments, the heavy chain variable may have one or more additional mutations in the VH amino acid sequence set forth in SEQ ID NO: 88, but has improved specific binding to a cancer antigen (e.g., CLDN6). In some embodiments, the antigen-binding protein comprises a heavy chain variable comprising the amino acid sequence of SEQ ID NO: 88.

[0422] In some embodiments, the antigen-binding protein comprises a light chain variable region having at least 90% identity to the VL amino acid sequence set forth in SEQ ID NO: 89, 90 or 91. In some embodiments, the antigen-binding protein comprises a light chain variable having at least 95% identity to the VL amino acid sequence set forth in SEQ ID NO: 89, 90 or 91. In some embodiments, the antigen-binding protein comprises a light chain variable having at least 96, 97, 98, or 99% identity to the VL amino acid sequence set forth in SEQ ID NO: 89, 90 or 91. In several embodiments, the light chain variable may have one or more additional mutations (e.g., for purposes of humanization) in the VL amino acid sequence set forth in SEQ ID NO: 89, 90 or 91, but retains specific binding to a cancer antigen (e.g., CLDN6). In several embodiments, the light chain variable may have one or more additional mutations in the VL amino acid sequence set forth in SEQ ID NO: 89, 90 or 91, but has improved specific binding to a cancer antigen (e.g., CLDN6). In some embodiments, the antigen-binding protein comprises a light chain variable comprising the amino acid sequence of SEQ ID NO: 89, 90 or 91. In some embodiments, the VL comprises the amino acid sequence of SEQ ID NO: 89. In some embodiments, the VL comprises the amino acid sequence of SEQ ID NO: 90. In some embodiments, the VL comprises the amino acid sequence of SEQ ID NO: 91.

### CD19

[0423] In some embodiments, the antigen-binding protein binds to CD19. In some embodiments, an antigen-binding protein is provided comprising a heavy chain variable domain having at least 90% identity to the VH domain amino acid sequence set forth in SEQ ID NO: 33. In some embodiments, the antigen-binding protein comprises a heavy chain variable domain having at least 95% identity to the VH domain amino acid sequence set forth in SEQ ID NO: 33. In some embodiments, the antigen-binding protein comprises a heavy chain variable domain having at least 96, 97, 98, or 99% identity to the VH domain amino acid sequence set forth in SEQ ID NO: 33. In several embodiments, the heavy chain variable domain may have one or more additional mutations (e.g., for purposes of humanization) in the VH domain amino acid sequence set forth in SEQ ID NO: 33, but retains specific binding to a cancer antigen (e.g., CD19). In several embodiments, the heavy chain variable domain may have one or more additional mutations in the VH domain amino acid sequence set forth in SEQ ID NO: 33, but has improved specific binding to a cancer antigen (e.g., CD19). In some embodiments, the VH comprises the amino acid sequence set forth in SEQ ID NO:33.

[0424] In some embodiments, the antigen-binding protein comprises a light chain variable domain having at least 90% identity to the VL domain amino acid sequence set forth in SEQ ID NO: 32. In some embodiments, the antigen-binding protein comprises a light chain variable domain having at least 95% identity to the VL domain amino acid sequence set forth in SEQ ID NO: 32. In some embodiments, the antigen-binding protein comprises a light chain variable domain having at least 96, 97, 98, or 99% identity to the VL domain amino acid sequence set forth in SEQ ID NO: 32. In several embodiments, the light chain variable domain may have one or more additional mutations (e.g., for purposes of humanization) in the VL domain amino acid sequence set forth in SEQ ID NO: 32, but retains specific binding to a cancer antigen (e.g., CD19). In several embodiments, the light chain variable domain may have one or more additional mutations in the VL domain amino acid sequence set forth in SEQ ID NO: 32, but has improved specific binding to a cancer antigen (e.g., CD19). In some embodiments, the VH comprises the amino acid sequence set forth in SEQ ID NO:32.

[0425] In some embodiments, the antigen-binding protein comprises a heavy chain variable domain having at least 90% identity to the VH domain amino acid sequence set forth in SEQ ID NO: 33, and a light chain variable domain having at least 90% identity to the VL domain amino acid sequence set forth in SEQ ID NO: 32. In some embodiments, the antigen-binding protein comprises a heavy chain variable domain having at least 95% identity to the VH domain amino acid sequence set forth in SEQ ID NO: 33, and a light chain variable domain having at least 95% identity to the VL domain amino acid sequence set forth in SEQ ID NO: 32. In some embodiments, the antigen-binding protein comprises a heavy chain variable domain having at least 96, 97, 98, or 99% identity to the VH domain amino acid sequence set forth in SEQ ID NO: 33, and a light chain variable domain having at least 96, 97, 98, or 99% identity to the VL domain amino acid sequence set forth in SEQ ID NO: 32.

[0426] In some embodiments, the antigen-binding protein comprises a heavy chain variable domain having the VH domain amino acid sequence set forth in SEQ ID NO: 33, and a light chain variable domain having the VL domain amino acid sequence set forth in SEQ ID NO: 32. In some embodiments, the light-chain variable domain comprises a sequence of amino acids that is at least 70%, 75%, 80%, 85%, 90%, 91%, 92%, 93%, 94%, 95%, 96%, 97%, 98%, 99%, or more, identical to the sequence of a light chain variable domain of SEQ ID NO: 32. In some embodiments, the light-chain variable domain comprises a sequence of amino acids that is at least 70%, 75%, 80%, 85%, 90%, 91%, 92%, 93%, 94%, 95%, 96%, 97%, 98%, 99%, or more, identical to the sequence of a heavy chain variable domain in accordance with SEQ ID NO: 33.

[0427] In some embodiments, the light chain variable domain comprises a sequence of amino acids that is encoded by a nucleotide sequence that is at least 70%, 75%, 80%, 85%, 90%, 91%, 92%, 93%, 94%, 95%, 96%, 97%, 98%, 99%, or more, identical to the polynucleotide sequence SEQ ID NO: 32. In some embodiments, the light chain variable domain comprises a sequence of amino acids that is encoded by a polynucleotide that hybridizes under moderately stringent conditions to the complement of a polynucleotide that encodes a light chain variable domain in accordance with the sequence in SEQ ID NO: 32. In some embodiments, the light chain variable domain comprises a sequence of amino acids that is encoded by a polynucleotide that hybridizes under stringent conditions to the complement of a polynucleotide that encodes a light chain variable domain in accordance with the sequence in SEQ ID NO: 32.

[0428] In some embodiments, the heavy chain variable domain comprises a sequence of amino acids that is at least 70%, 75%, 80%, 85%, 90%, 91%, 92%, 93%, 94%, 95%, 96%, 97%, 98%, 99%, or more, identical to the sequence of a heavy chain variable domain in accordance with the sequence of SEQ ID NO: 33. In some embodiments, the heavy chain variable domain comprises a sequence of amino acids that is encoded by a polynucleotide that hybridizes under moderately stringent conditions to the complement of a polynucleotide that encodes a heavy chain variable domain in accordance with the sequence of SEQ ID NO: 33. In some embodiments, the heavy chain variable domain comprises a sequence of amino acids that is encoded by a polynucleotide that hybridizes under stringent conditions to the complement of a polynucleotide that encodes a heavy chain variable domain in accordance with the sequence of SEQ ID NO: 33.

[0429] In some embodiments, the anti-CD19 binding protein is an scFv comprising a VH and a VL. In several embodiments, additional anti-CD19 binding constructs are provided. For example, in several embodiments, there is provided an scFv that targets CD19 wherein the scFv comprises a heavy chain variable region comprising the sequence of SEQ ID NO. 35. In some embodiments, the antigen-binding protein comprises a heavy chain variable domain having at least 95% identity to the HCV domain amino acid sequence set forth in SEQ ID NO: 35. In some embodiments, the antigen-binding protein comprises a heavy chain variable domain having at least 96, 97, 98, or 99% identity to the HCV domain amino acid sequence set forth in SEQ ID NO: 35. In several embodiments, the heavy chain variable domain may have one or more additional mutations (e.g., for purposes of humanization) in the HCV domain amino acid sequence set forth in SEQ ID NO: 35, but retains specific binding to a cancer antigen (e.g., CD19). In several embodiments, the heavy chain variable domain may have one or more additional mutations in the HCV domain amino acid sequence set forth in SEQ ID NO: 35, but has improved specific binding to a cancer antigen (e.g., CD19).

[0430] Additionally, in several embodiments, an scFv that targets CD19 comprises a light chain variable region comprising the sequence of SEQ ID NO. 36. In some embodiments, the antigen-binding protein comprises a light chain variable domain having at least 95% identity to the LCV domain amino acid sequence set forth in SEQ ID NO: 36. In some embodiments, the antigen-binding protein comprises a light chain variable domain having at least 96, 97, 98, or 99% identity to the LCV domain amino acid sequence set forth in SEQ ID NO: 36. In several embodiments, the light chain variable domain may have one or more additional mutations (e.g., for purposes of humanization) in the LCV domain amino acid sequence set forth in SEQ ID NO: 36, but retains specific binding to a cancer antigen (e.g., CD19). In several embodiments, the light chain variable domain may have one or more additional mutations in the LCV domain amino acid sequence set forth in SEQ ID NO: 36, but has improved specific binding to a cancer antigen (e.g., CD19). In some embodiments, the scFv comprises a VH comprising the amino acid sequence of SEQ ID NO:35 and a VL comprising the amino acid sequence of SEQ ID NO:36.

[0431] In several embodiments, there is also provided an anti-CD19 binding moiety that comprises a light chain CDR comprising a first, second and third complementarity determining region (LC CDR1, LC CDR2, and LC CDR3, respectively. In several embodiments, the anti-CD19 binding moiety further comprises a heavy chain CDR comprising a first, second and third complementarity determining region (HC CDR1, HC CDR2, and HC CDR3, respectively. In several embodiments, the LC CDR1 comprises the sequence of SEQ ID NO. 37. In several embodiments, the LC CDR1 comprises an amino acid sequence with at least about 85%, about 90%, about 95%, or about 98% sequence identity to the sequence of SEQ NO. 37. In several embodiments, the LC CDR2 comprises the sequence of SEQ ID NO. 38. In several embodiments, the LC CDR2 comprises an amino acid sequence with at least about 85%, about 90%, about 95%, or about 98% sequence identity to the sequence of SEQ NO. 38. In several embodiments, the LC CDR3 comprises the sequence of SEQ ID NO. 39. In several embodiments, the LC CDR3 comprises an amino acid sequence with at least about 85%, about 90%, about 95%, or about 98% sequence identity to the sequence of SEQ NO. 39. In several embodiments, the HC CDR1 comprises the sequence of SEQ ID NO. 40. In several embodiments, the HC CDR1 comprises an amino acid sequence with at least about 85%, about 90%, about 95%, or about 98% sequence identity to the sequence of SEQ NO. 40. In several embodiments, the HC CDR2 comprises the sequence of SEQ ID NO. 41, 42, or 43. In several embodiments, the HC CDR2 comprises an amino acid sequence with at least about 85%, about 90%, about 95%, or about 98% sequence identity to the sequence of SEQ NO. 41, 42, or 43. In several embodiments, the HC CDR3 comprises the sequence of SEQ ID NO. 44. In several embodiments, the HC CDR3 comprises an amino acid sequence with at least about 85%, about 90%, about 95%, or about 98% sequence identity to the sequence of SEQ NO. 44.

[0432] In several embodiments, there is also provided an anti-CD19 binding moiety that comprises a light chain variable region (VL) and a heavy chain variable region (HL), the VL region comprising a first, second and third complementarity determining region (VL CDR1, VL CDR2, and VL CDR3, respectively and the VH region comprising a first, second and third complementarity determining region (VH CDR1, VH CDR2, and VH CDR3, respectively. In several embodiments, the VL region comprises the sequence of SEQ ID NO. 45, 46, 47, or 48. In several embodiments, the VL region comprises an amino acid sequence with at least about 85%, about 90%, about 95%, or about 98% sequence identity to the sequence of SEQ NO. 45, 46, 47, or 48. In several embodiments, the VH region comprises the sequence of SEQ ID NO. 49, 50, 51 or 52. In several embodiments, the VH region comprises an amino acid sequence with at least about 85%, about 90%, about 95%, or about 98% sequence identity to the sequence of SEQ NO. 49, 50, 51 or 52.

[0433] In several embodiments, there is also provided an anti-CD19 binding moiety that comprises a light chain CDR comprising a first, second and third complementarity determining region (LC CDR1, LC CDR2, and LC CDR3, respectively. In several embodiments, the anti-CD19 binding moiety further comprises a heavy chain CDR comprising a first, second and third complementarity determining region (HC CDR1, HC CDR2, and HC CDR3, respectively. In several embodiments, the LC CDR1 comprises the sequence of SEQ ID NO. 53. In several embodiments, the LC CDR1 comprises an amino acid sequence with at least about 85%, about 90%, about 95%, or about 98% sequence identity to the sequence of SEQ NO. 53. In several embodiments, the LC CDR2 comprises the sequence of SEQ ID NO. 54. In several embodiments, the LC CDR2 comprises an amino acid sequence with at least about 85%, about 90%, about 95%, or about 98% sequence identity to the sequence of SEQ NO. 54. In several embodiments, the LC CDR3 comprises the sequence of SEQ ID NO. 55. In several embodiments, the LC CDR3 comprises an amino acid sequence with at least about 85%, about 90%, about 95%, or about 98% sequence identity to the sequence of SEQ NO. 55. In several embodiments, the HC CDR1 comprises the sequence of SEQ ID NO. 56. In several embodiments, the HC CDR1 comprises an amino acid sequence with at least about 85%, about 90%, about 95%, or about 98% sequence identity to the sequence of SEQ NO. 56. In several embodiments, the HC CDR2 comprises the sequence of SEQ ID NO. 57. In several embodiments, the HC CDR2 comprises an amino acid sequence with at least about 85%, about 90%, about 95%, or about 98% sequence identity to the sequence of SEQ NO. 57. In several embodiments, the HC CDR3 comprises the sequence of SEQ ID NO. 58. In several embodiments, the HC CDR3 comprises an amino acid sequence with at least about 85%, about 90%, about 95%, or about 98% sequence identity to the sequence of SEQ NO. 58.

[0434] In some embodiments, the antigen-binding protein comprises a heavy chain variable region comprising the amino acid sequence of SEQ ID NO: 104. In some embodiments, the antigen-binding protein comprises a heavy chain variable region having at least 90% identity to the VH domain amino acid sequence set forth in SEQ ID NO: 104. In some embodiments, the antigen-binding protein comprises a heavy chain variable domain having at least 95% sequence identity to the VH domain amino acid sequence set forth in SEQ ID NO: 104. In some embodiments, the antigen-binding protein comprises a heavy chain variable domain having at least 96, 97, 98, or 99% sequence identity to the VH domain amino acid sequence set forth in SEQ ID NO: 104. In several embodiments, the heavy chain variable domain may have one or more additional mutations (e.g., for purposes of humanization) in the VH domain amino acid sequence set forth in SEQ ID NO: 104, but retains specific binding to a cancer antigen (e.g., CD19). In several embodiments, the heavy chain variable domain may have one or more additional mutations in the VH domain amino acid sequence set forth in SEQ ID NO: 104, but has improved specific binding to a cancer antigen (e.g., CD19).

[0435] In some embodiments, the antigen-binding protein comprises a light chain variable region comprising the amino acid sequence of SEQ ID NO: 105. In some embodiments, the antigen-binding protein comprises a light chain variable region having at least 90% sequence identity to the VL domain amino acid sequence set forth in SEQ ID NO: 105. In some embodiments, the antigen-binding protein comprises a light chain variable domain having at least 95% sequence identity to the VL domain amino acid sequence set forth in SEQ ID NO: 105. In some embodiments, the antigen-binding protein comprises a light chain variable domain having at least 96, 97, 98, or 99% sequence identity to the VL domain amino acid sequence set forth in SEQ ID NO: 105. In several embodiments, the light chain variable domain may have one or more additional mutations (e.g., for purposes of humanization) in the VL domain amino acid sequence set forth in SEQ ID NO: 105, but retains specific binding to a cancer antigen (e.g., CD19). In several embodiments, the light chain variable domain may have one or more additional mutations in the VL domain amino acid sequence set forth in SEQ ID NO: 105, but has improved specific binding to a cancer antigen (e.g., CD19).

[0436] In some embodiments, the antigen-binding protein comprises a heavy chain variable domain having the VH domain amino acid sequence set forth in SEQ ID NO: 104, and a light chain variable domain having the VL domain amino acid sequence set forth in SEQ ID NO: 105. In some embodiments, the light-chain variable domain comprises a sequence of amino acids that is at least 70%, 75%, 80%, 85%, 90%, 91%, 92%, 93%, 94%, 95%, 96%, 97%, 98%, 99%, or more, identical to the sequence of a light chain variable domain of SEQ ID NO: 105. In some embodiments, the heavy-chain variable domain comprises a sequence of amino acids that is at least 70%, 75%, 80%, 85%, 90%, 91%, 92%, 93%, 94%, 95%, 96%, 97%, 98%, 99%, or more, identical to the sequence of a heavy chain variable domain in accordance with SEQ ID NO: 104.

[0437] In some embodiments, the antigen-binding protein comprises a heavy chain variable comprising the amino acid sequence of SEQ ID NO: 106. In some embodiments, the antigen-binding protein comprises a heavy chain variable having at least 90% sequence identity to the VH amino acid sequence set forth in SEQ ID NO: 106. In some embodiments, the antigen-binding protein comprises a heavy chain variable having at least 95% sequence identity to the VH amino acid sequence set forth in SEQ ID NO: 106. In some embodiments, the antigen-binding protein comprises a heavy chain variable having at least 96, 97, 98, or 99% identity to the VH amino acid sequence set forth in SEQ ID NO: 106. In several embodiments, the heavy chain variable may have one or more additional mutations (e.g., for purposes of humanization) in the VH amino acid sequence set forth in SEQ ID NO: 106, but retains specific binding to a cancer antigen (e.g., CD19). In several embodiments, the heavy chain variable may have one or more additional mutations in the VH amino acid sequence set forth in SEQ ID NO: 106, but has improved specific binding to a cancer antigen (e.g., CD19).

[0438] In some embodiments, the antigen-binding protein comprises a light chain variable comprising the amino acid sequence of SEQ ID NO: 107. In some embodiments, the antigen-binding protein comprises a light chain variable region having at least 90% sequence identity to the VL amino acid sequence set forth in SEQ ID NO: 107. In some embodiments, the antigen-binding protein comprises a light chain variable having at least 95% sequence identity to the VL amino acid sequence set forth in SEQ ID NO: 107. In some embodiments, the antigen-binding protein comprises a light chain variable having at least 96, 97, 98, or 99% identity to the VL amino acid sequence set forth in SEQ ID NO: 107. In several embodiments, the light chain variable may have one or more additional mutations (e.g., for purposes of humanization) in the VL amino acid sequence set forth in SEQ ID NO: 107, but retains specific binding to a cancer antigen (e.g., CD19). In several embodiments, the light chain variable may have one or more additional mutations in the VL amino acid sequence set forth in SEQ ID NO: 107, but has improved specific binding to a cancer antigen (e.g., CD19).

[0439] In several embodiments, there is also provided an anti-CD19 binding moiety that comprises a light chain CDR comprising a first, second and third complementarity determining region (LC CDR1, LC CDR2, and LC CDR3, respectively. In several embodiments, the anti-CD19 binding moiety further comprises a heavy chain CDR comprising a first, second and third complementarity determining region (HC CDR1, HC CDR2, and HC CDR3, respectively. In several embodiments, the LC CDR1 comprises the sequence of SEQ ID NO. 108. In several embodiments, the LC CDR1 comprises an amino acid sequence with at least about 85%, about 90%, about 95%, or about 98% sequence identity to the sequence of SEQ NO. 108. In several embodiments, the LC CDR2 comprises the sequence of SEQ ID NO. 109. In several embodiments, the LC CDR2 comprises an amino acid sequence with at least about 85%, about 90%, about 95%, or about 98% sequence identity to the sequence of SEQ NO. 109. In several embodiments, the LC CDR3 comprises the sequence of SEQ ID NO. 110. In several embodiments, the LC CDR3 comprises an amino acid sequence with at least about 85%, about 90%, about 95%, or about 98% sequence identity to the sequence of SEQ NO. 110. In several embodiments, the HC CDR1 comprises the sequence of SEQ ID NO. 111. In several embodiments, the HC CDR1 comprises an amino acid sequence with at least about 85%, about 90%, about 95%, or about 98% sequence identity to the sequence of SEQ NO. 111. In several embodiments, the HC CDR2 comprises the sequence of SEQ ID NO. 112, 113, or 114. In several embodiments, the HC CDR2 comprises an amino acid sequence with at least about 85%, about 90%, about 95%, or about 98% sequence identity to the sequence of SEQ NO. 112, 113, or 114. In several embodiments, the HC CDR3 comprises the sequence of SEQ ID NO. 115. In several embodiments, the HC CDR3 comprises an amino acid sequence with at least about 85%, about 90%, about 95%, or about 98% sequence identity to the sequence of SEQ NO. 115. In several embodiments, the anti-CD19 binding moiety comprises SEQ ID NO: 116, or is sequence with at least about 85%, about 90%, about 95%, or about 98% sequence identity to the sequence of SEQ NO. 116.

[0440] In some embodiments, the antigen-binding protein comprises a light chain variable comprising the amino acid sequence of SEQ ID NO: 117, 118, or 119. In some embodiments, the antigen-binding protein comprises a light chain variable region having at least 90% identity to the VL amino acid sequence set forth in SEQ ID NO: 117, 118, or 119. In some embodiments, the antigen-binding protein comprises a light chain variable having at least 95% identity to the VL amino acid sequence set forth in SEQ ID NO: 117, 118, or 119. In some embodiments, the antigen-binding protein comprises a light chain variable having at least 96, 97, 98, or 99% identity to the VL amino acid sequence set forth in SEQ ID NO: 117, 118, or 119. In several embodiments, the light chain variable may have one or more additional mutations (e.g., for purposes of humanization) in the VL amino acid sequence set forth in SEQ ID NO: 117, 118, or 119, but retains specific binding to a cancer antigen (e.g., CD19). In several embodiments, the light chain variable may have one or more additional mutations in the VL amino acid sequence set forth in SEQ ID NO: 117, 118, or 119, but has improved specific binding to a cancer antigen (e.g., CD19).

[0441] In some embodiments, the antigen-binding protein comprises a heavy chain variable comprising the amino acid sequence of SEQ ID NO: 120, 121, 122, or 123. In some embodiments, the antigen-binding protein comprises a heavy chain variable having at least 90% identity to the VH amino acid sequence set forth in SEQ ID NO: 120, 121, 122, or 123. In some embodiments, the antigen-binding protein comprises a heavy chain variable having at least 95% identity to the VH amino acid sequence set forth in SEQ ID NO: 120, 121, 122, or 123. In some embodiments, the antigen-binding protein comprises a heavy chain variable having at least 96, 97, 98, or 99% identity to the VH amino acid sequence set forth in SEQ ID NO: 120, 121, 122, or 123. In several embodiments, the heavy chain variable may have one or more additional mutations (e.g., for purposes of humanization) in the VH amino acid sequence set forth in SEQ ID NO: 120, 121, 122, or 123, but retains specific binding to a cancer antigen (e.g., CD19). In several embodiments, the heavy chain variable may have one or more additional mutations in the VH amino acid sequence set forth in SEQ ID NO: 120, 121, 122, or 123, but has improved specific binding to a cancer antigen (e.g., CD19).

[0442] In several embodiments, there is also provided an anti-CD19 binding moiety that comprises a light chain CDR comprising a first, second and third complementarity determining region (LC CDR1, LC CDR2, and LC CDR3, respectively. In several embodiments, the anti-CD19 binding moiety further comprises a heavy chain CDR comprising a first, second and third complementarity determining region (HC CDR1, HC CDR2, and HC CDR3, respectively. In several embodiments, the LC CDR1 comprises the sequence of SEQ ID NO. 124, 127, or 130. In several embodiments, the LC CDR1 comprises an amino acid sequence with at least about 85%, about 90%, about 95%, or about 98% sequence identity to the sequence of SEQ NO. 124, 127, or 130. In several embodiments, the LC CDR2 comprises the sequence of SEQ ID NO. 125, 128, or 131. In several embodiments, the LC CDR2 comprises an amino acid sequence with at least about 85%, about 90%, about 95%, or about 98% sequence identity to the sequence of SEQ NO. 125, 128, or 131. In several embodiments, the LC CDR3 comprises the sequence of SEQ ID NO. 126, 129, or 132. In several embodiments, the LC CDR3 comprises an amino acid sequence with at least about 85%, about 90%, about 95%, or about 98% sequence identity to the sequence of SEQ NO. 126, 129, or 132. In several embodiments, the HC CDR1 comprises the sequence of SEQ ID NO. 133, 136, 139, or 142. In several embodiments, the HC CDR1 comprises an amino acid sequence with at least about 85%, about 90%, about 95%, or about 98% sequence identity to the sequence of SEQ NO. 133, 136, 139, or 142. In several embodiments, the HC CDR2 comprises the sequence of SEQ ID NO. 134, 137, 140, or 143. In several embodiments, the HC CDR2 comprises an amino acid sequence with at least about 85%, about 90%, about 95%, or about 98% sequence identity to the sequence of SEQ NO. 134, 137, 140, or 143. In several embodiments, the HC CDR3 comprises the sequence of SEQ ID NO. 135, 138, 141, or 144. In several embodiments, the HC CDR3 comprises an amino acid sequence with at least about 85%, about 90%, about 95%, or about 98% sequence identity to the sequence of SEQ NO. 135, 138, 141, or 144.

[0443] Additional anti-CD19 binding moieties are known in the art, such as those disclosed in, for example, U.S. Pat. No. 8,399,645, US Patent Publication No. 2018/0153977, US Patent Publication No. 2014/0271635, US Patent Publication No. 2018/0251514, US Patent Publication No. 2018/0312588, and WO 2020/180882, the entirety of each of which is incorporated by reference herein.

[0444] In several embodiments, there is also provided an anti-CLDN6 binding moiety that comprises a light chain CDR comprising a first, second and third complementarity determining region (LC CDR1, LC CDR2, and LC CDR3, respectively. In several embodiments, the anti-CD19 binding moiety further comprises a heavy chain CDR comprising a first, second and third complementarity determining region (HC CDR1, HC CDR2, and HC CDR3, respectively. In several embodiments, the LC CDR1 comprises the sequence of SEQ ID NO. 95, 98, or 101. In several embodiments, the LC CDR1 comprises an amino acid sequence with at least about 85%, about 90%, about 95%, or about 98% sequence identity to the sequence of SEQ NO. 95, 98, or 101. In several embodiments, the LC CDR2 comprises the sequence of SEQ ID NO. 96, 99, or 102. In several embodiments, the LC CDR2 comprises an amino acid sequence with at least about 85%, about 90%, about 95%, or about 98% sequence identity to the sequence of SEQ NO. 96, 99, or 102. In several embodiments, the LC CDR3 comprises the sequence of SEQ ID NO. 97, 100, or 103. In several embodiments, the LC CDR3 comprises an amino acid sequence with at least about 85%, about 90%, about 95%, or about 98% sequence identity to the sequence of SEQ NO. 97, 100, or 103. In several embodiments, the HC CDR1 comprises the sequence of SEQ ID NO. 92. In several embodiments, the HC CDR1 comprises an amino acid sequence with at least about 85%, about 90%, about 95%, or about 98% sequence identity to the sequence of SEQ NO. 92. In several embodiments, the HC CDR2 comprises the sequence of SEQ ID NO. 93. In several embodiments, the HC CDR2 comprises an amino acid sequence with at least about 85%, about 90%, about 95%, or about 98% sequence identity to the sequence of SEQ NO. 93. In several embodiments, the HC CDR3 comprises the sequence of SEQ ID NO. 94. In several embodiments, the HC CDR3 comprises an amino acid sequence with at least about 85%, about 90%, about 95%, or about 98% sequence identity to the sequence of SEQ NO. 94. In several embodiments, the antigen-binding protein does not bind claudins other than CLDN6.

b. Natural Killer Group Domains that Bind Tumor Ligands

[0445] In several embodiments, engineered immune cells such as NK cells are leveraged for their ability to recognize and destroy tumor cells. For example, an engineered NK cell may include a CD19-directed chimeric antigen receptor or a nucleic acid encoding said chimeric antigen receptor (or a CAR directed against, for example, one or more of CD123, CD70, Her2, mesothelin, Claudin 6, BCMA, EGFR, etc.). NK cells express both inhibitory and activating receptors on the cell surface. Inhibitory receptors bind self-molecules expressed on the surface of healthy cells (thus preventing immune responses against “self” cells), while the activating receptors bind ligands expressed on abnormal cells, such as tumor cells. When the balance between inhibitory and activating receptor activation is in favor of activating receptors, NK cell activation occurs and target (e.g., tumor) cells are lysed.

[0446] Natural killer Group 2 member D (NKG2D) is an NK cell activating receptor that recognizes a variety of ligands expressed on cells. The surface expression of various NKG2D ligands is generally low in healthy cells but is upregulated upon, for example, malignant transformation. Non-limiting examples of ligands recognized by NKG2D include, but are not limited to, MICA, MICB, ULBP1, ULBP2, ULBP3, ULBP4, ULBP5, and ULBP6, as well as other molecules expressed on target cells that control the cytolytic or cytotoxic function of NK cells. In several embodiments, T cells are engineered to express an extracellular domain to binds to one or more tumor ligands and activate the T cell. For example, in several embodiments, T cells are engineered to express an NKG2D receptor as the binder/activation moiety. In several embodiments, engineered cells as disclosed herein are engineered to express another member of the NKG2 family, e.g., NKG2A, NKG2C, and/or NKG2E. Combinations of such receptors are engineered in some embodiments. Moreover, in several embodiments, other receptors are expressed, such as the Killer-cell immunoglobulin-like receptors (KIRs).

[0447] In several embodiments, cells are engineered to express a cytotoxic receptor complex comprising a full length NKG2D as an extracellular component to recognize ligands on the surface of tumor cells (e.g., liver cells). In one embodiment, full length NKG2D has the nucleic acid sequence of SEQ ID NO: 27. In several embodiments, the full length NKG2D, or functional fragment thereof is human NKG2D. Additional information about chimeric receptors for use in the presently disclosed methods and compositions can be found in PCT Patent Publication No. WO/2018/183385, which is incorporated in its entirety by reference herein.

[0448] In several embodiments, cells are engineered to express a cytotoxic receptor complex comprising a functional fragment of NKG2D as an extracellular component to recognize ligands on the surface of tumor cells or other diseased cells. In one embodiment, the functional fragment of NKG2D has the nucleic acid sequence of SEQ ID NO: 25. In several embodiments, the fragment of NKG2D is at least 70%, at least 75%, at least 80%, at least 85%, at least 90%, or at least 95% homologous with full-length wild-type NKG2D. In several embodiments, the fragment may have one or more additional mutations from SEQ ID NO: 25, but retains, or in some embodiments, has enhanced, ligand-binding function. In several embodiments, the functional fragment of NKG2D comprises the amino acid sequence of SEQ ID NO: 26. In several embodiments, the NKG2D fragment is provided as a dimer, trimer, or other concatameric format, such embodiments providing enhanced ligand-binding activity. In several embodiments, the sequence encoding the NKG2D fragment is optionally fully or partially codon optimized. In one embodiment, a sequence encoding a codon optimized NKG2D fragment comprises the sequence of SEQ ID NO: 28. Advantageously, according to several embodiments, the functional fragment lacks its native transmembrane or intracellular domains but retains its ability to bind ligands of NKG2D as well as transduce activation signals upon ligand binding. A further advantage of such fragments is that expression of DAP10 to localize NKG2D to the cell membrane is not required. Thus, in several embodiments, the cytotoxic receptor complex encoded by the polypeptides disclosed herein does not comprise DAP10. In several embodiments, immune cells, such as NK or T cells (e.g., non-alloreactive T cells engineered according to embodiments disclosed herein), are engineered to express one or more chimeric receptors that target, for example CD19, CD123, CD70, Her2, mesothelin, Claudin 6, BCMA, EGFR, and an NKG2D ligand, such as MICA, MICB, ULBP1, ULBP2, ULBP3, ULBP4, ULBP5, and/or ULBP6. Such cells, in several embodiments, also co-express mbIL15.

[0449] In several embodiments, the cytotoxic receptor complexes are configured to dimerize. Dimerization may comprise homodimers or heterodimers, depending on the embodiment. In several embodiments, dimerization results in improved ligand recognition by the cytotoxic receptor complexes (and hence the NK cells expressing the receptor), resulting in a reduction in (or lack) of adverse toxic effects. In several embodiments, the cytotoxic receptor complexes employ internal dimers, or repeats of one or more component subunits. For example, in several embodiments, the cytotoxic receptor complexes may optionally comprise a first NKG2D extracellular domain coupled to a second NKG2D extracellular domain, and a transmembrane/signaling region (or a separate transmembrane region along with a separate signaling region).

[0450] In several embodiments, the various domains/subdomains are separated by a linker such as, a GS3 linker (SEQ ID NO: 15 and 16, nucleotide and protein, respectively) is used (or a GSn linker). Other linkers used according to various embodiments disclosed herein include, but are not limited to those encoded by SEQ ID NO: 17, 19, 21 or 23. This provides the potential to separate the various component parts of the receptor complex along the polynucleotide, which can enhance expression, stability, and/or functionality of the receptor complex.

### Cytotoxic Signaling Complex

[0451] Some embodiments of the compositions and methods described herein relate to a chimeric receptor, such as a chimeric antigen receptor (e.g., a CAR directed to CD19, CD123, CD70, Her2, mesothelin, Claudin 6, BCMA, or EGFR (among others), or a chimeric receptor directed against an NKG2D ligand, such as MICA, MICB, ULBP1, ULBP2, ULBP3, ULBP4, ULBP5, and/or ULBP6) that includes a cytotoxic signaling complex. As disclosed herein, according to several embodiments, the provided cytotoxic receptor complexes comprise one or more transmembrane and/or intracellular domains that initiate cytotoxic signaling cascades upon the extracellular domain(s) binding to ligands on the surface of target cells.

[0452] Thus, in some embodiments, the chimeric receptor comprises an extracellular binding domain, a transmembrane domain, and an intracellular signaling domain. In several embodiments, the cytotoxic signaling complex comprises at least one transmembrane domain, at least one co-stimulatory domain, and/or at least one signaling domain. In some embodiments, more than one component part makes up a given domain—e.g., a co-stimulatory domain may comprise two subdomains. In some embodiments, the intracellular signaling domain comprises a primary signaling domain (e.g., CD3zeta) and a co-stimulatory signaling domain. Moreover, in some embodiments, a domain may serve multiple functions, for example, a transmembrane domain may also serve to provide signaling function.

a. Transmembrane Domains

[0453] Some embodiments of the compositions and methods described herein relate to chimeric receptors (e.g., tumor antigen-directed CARs and/or ligand-directed chimeric receptors) that comprise a transmembrane domain. Some embodiments include a transmembrane domain from NKG2D or another transmembrane protein. In several embodiments in which a transmembrane domain is employed, the portion of the transmembrane protein employed retains at least a portion of its normal transmembrane domain.

[0454] The antigen-binding protein generally is linked to one or more intracellular signaling components, such as signaling components that mimic activation through an antigen receptor complex, such as a TCR complex, in the case of a CAR, and/or signal via another cell surface receptor. Thus, in some embodiments, the antigen-binding component (e.g., antibody) is linked to one or more transmembrane and intracellular signaling domains. In some embodiments, the transmembrane domain is fused to the extracellular domain. In one embodiment, a transmembrane domain that naturally is associated with one of the domains in the receptor, e.g., CAR, is used. In some instances, the transmembrane domain is selected or modified by amino acid substitution to avoid binding of such domains to the transmembrane domains of the same or different surface membrane proteins to minimize interactions with other members of the receptor complex.

[0455] The transmembrane domain in some embodiments is derived either from a natural or from a synthetic source. Where the source is natural, the domain in some aspects is derived from any membrane-bound or transmembrane protein. Transmembrane regions include those derived from (i.e., comprise at least the transmembrane region(s) of) the alpha, beta or zeta chain of the T-cell receptor, CD28, CD3 epsilon, CD45, CD4, CD5, CDS, CD9, CD 16, CD22, CD33, CD37, CD64, CD80, CD86, CD 134, CD137, CD 154 and/or transmembrane regions containing functional variants thereof such as those retaining a substantial portion of the structural, e.g., transmembrane, properties thereof. In some embodiments, the transmembrane domain is a transmembrane domain derived from CD4, CD28, or CD8, e.g., CD8alpha, or functional variant thereof. Alternatively, the transmembrane domain in some embodiments is synthetic.

[0456] In several embodiments, however, the transmembrane domain comprises at least a portion of CD8, a transmembrane glycoprotein normally expressed on both T cells and NK cells. In several embodiments, the transmembrane domain comprises CD8α. In several embodiments, the transmembrane domain comprises a CD8 (e.g., CD8 a) hinge and a CD8 (e.g., CD8 a) transmembrane region. In several embodiments, the transmembrane domain comprises a “hinge”, e.g., a CD8α hinge. In several embodiments, the “hinge” of CD8α has the nucleic acid sequence of SEQ ID NO: 1. In several embodiments, the CD8α hinge is truncated or modified and is at least 70%, at least 75%, at least 80%, at least 85%, at least 90%, at least 95% homologous with the CD8α having the sequence of SEQ ID NO: 1. In several embodiments, the “hinge” of CD8α comprises the amino acid sequence of SEQ ID NO: 2. In several embodiments, the CD8α can be truncated or modified, such that it is at least 70%, at least 75%, at least 80%, at least 85%, at least 90%, at least 95% homologous with the sequence of SEQ ID NO: 2.

[0457] In several embodiments, the transmembrane domain comprises a CD8α transmembrane region. In several embodiments, the CD8α transmembrane region is encoded by a nucleic acid sequence of SEQ ID NO: 3. In several embodiments, the CD8α transmembrane region is truncated or modified and is encoded by a nucleic acid sequence that is at least 70%, at least 75%, at least 80%, at least 85%, at least 90%, at least 95% homologous with the CD8α having the sequence of SEQ ID NO: 3. In several embodiments, the CD8α transmembrane region comprises the amino acid sequence of SEQ ID NO: 4. In several embodiments, the CD8α transmembrane region is truncated or modified and is at least 70%, at least 75%, at least 80%, at least 85%, at least 90%, at least 95% homologous with the CD8α having the sequence of SEQ ID NO: 4.

[0458] Taken together in several embodiments, the CD8 transmembrane domain is encoded by the nucleic acid sequence of SEQ ID NO: 13. In several embodiments, the CD8 transmembrane domain is truncated or modified and is at least 70%, at least 75%, at least 80%, at least 85%, at least 90%, at least 95% homologous with the CD8 transmembrane domain having the sequence of SEQ ID NO: 13. In several embodiments, the CD8 transmembrane domain comprises the amino acid sequence of SEQ ID NO: 14. In several embodiments, the CD8 transmembrane domain is truncated or modified and is at least 70%, at least 75%, at least 80%, at least 85%, at least 90%, at least 95% homologous with the CD8 transmembrane domain having the sequence of SEQ ID NO: 14.

[0459] In some embodiments, the transmembrane domain comprises a CD28 transmembrane domain or a fragment thereof. In several embodiments, the CD28 transmembrane domain comprises the amino acid sequence of SEQ ID NO: 30. In several embodiments, the CD28 transmembrane domain is truncated or modified and is at least 70%, at least 75%, at least 80%, at least 85%, at least 90%, at least 95% homologous with the CD28 transmembrane domain having the sequence of SEQ ID NO: 30.

b. Intracellular Signaling Domains

[0460] Some embodiments of the compositions and methods described herein relate to a chimeric receptor (e.g., tumor antigen-directed CARs and/or tumor ligand-directed chimeric receptors) that includes a signaling domain. Among the intracellular signaling domains are those that mimic or approximate a signal through a natural antigen receptor, a signal through such a receptor in combination with a costimulatory receptor, and/or a signal through a costimulatory receptor alone.

[0461] The receptor, e.g., the CAR, generally includes at least one intracellular signaling component or components. In some embodiments, the receptor includes an intracellular component of a TCR complex, such as a TCR CD3 chain that mediates T-cell activation and cytotoxicity, e.g., CD3 zeta chain. Thus, in some aspects, the antigen-binding portion is linked to one or more cell signaling modules. In some embodiments, upon ligation of the CAR or other chimeric receptor, the cytoplasmic domain or intracellular signaling domain of the receptor activates at least one of the normal effector functions or responses of the immune cell, e.g., T cell engineered to express the CAR. For example, in some contexts, the CAR induces a function of a T cell such as cytolytic activity or T-helper activity, such as secretion of cytokines or other factors. In some embodiments, a truncated portion of an intracellular signaling domain of an antigen receptor component or costimulatory molecule is used in place of an intact immuno stimulatory chain, for example, if it transduces the effector function signal. In some embodiments, the intracellular signaling domain or domains include the cytoplasmic sequences of the T cell receptor (TCR), and in some aspects also those of co-receptors that in the natural context act in concert with such receptors to initiate signal transduction following antigen receptor engagement.

[0462] In the context of a natural TCR, full activation generally requires not only signaling through the TCR, but also a costimulatory signal. Thus, in some embodiments, to promote full activation, a component for generating secondary or co-stimulatory signal is also included in the receptor.

[0463] T cell activation is in some aspects described as being mediated by two classes of cytoplasmic signaling sequences: those that initiate antigen-dependent primary activation through the TCR (primary cytoplasmic signaling sequences), and those that act in an antigen-independent manner to provide a secondary or co-stimulatory signal (secondary cytoplasmic signaling sequences). In some aspects, the receptor includes one or both of such signaling components.

[0464] In some aspects, the receptor includes a primary cytoplasmic signaling sequence that regulates primary activation of the TCR complex. Primary cytoplasmic signaling sequences that act in a stimulatory manner may contain signaling motifs which are known as immunoreceptor tyrosine-based activation motifs or ITAMs. Examples of ITAM containing primary cytoplasmic signaling sequences include those derived from TCR zeta, FcR gamma, FcR beta, CD3 gamma, CD3 delta, CD3 epsilon, CDS, CD22, CD79a, CD79b, and CD66d. In some embodiments, cytoplasmic signaling molecule(s) in the CAR contain(s) a cytoplasmic signaling domain, portion thereof, or sequence derived from CD3 zeta.

[0465] For example, immune cells engineered according to several embodiments disclosed herein may comprise at least one subunit of the CD3 T cell receptor complex (or a fragment thereof). In several embodiments, the signaling domain comprises the CD3 zeta subunit. In several embodiments, the CD3 zeta is encoded by the nucleic acid sequence of SEQ ID NO: 7. In several embodiments, the CD3 zeta can be truncated or modified, such that it is at least 70%, at least 75%, at least 80%, at least 85%, at least 90%, at least 95% homologous with the CD3 zeta having the sequence of SEQ ID NO: 7. In several embodiments, the CD3 zeta domain comprises the amino acid sequence of SEQ ID NO: 8. In several embodiments, the CD3 zeta domain is truncated or modified and is at least 70%, at least 75%, at least 80%, at least 85%, at least 90%, at least 95% homologous with the CD3 zeta domain having the sequence of SEQ ID NO: 8.

[0466] In some embodiments, the receptor includes a signaling domain and/or transmembrane portion of a costimulatory receptor, such as CD28, 4-1BB, OX40, DAP10, and ICOS. In some aspects, the same receptor includes both the activating and costimulatory components. In some embodiments, the intracellular signaling component of the recombinant receptor, such as CAR, comprises a CD3 zeta intracellular domain and a costimulatory signaling region. In some embodiments, the intracellular signaling domain comprises a chimeric OX40 co-stimulatory domain linked to a CD3 zeta intracellular domain.

[0467] In several embodiments, unexpectedly enhanced signaling is achieved through the use of multiple signaling domains whose activities act synergistically. For example, in several embodiments, the signaling domain further comprises an OX40 domain. In several embodiments, the OX40 domain is an intracellular signaling domain. In several embodiments, the OX40 intracellular signaling domain has the nucleic acid sequence of SEQ ID NO: 5. In several embodiments, the OX40 intracellular signaling domain can be truncated or modified, such that it is at least 70%, at least 75%, at least 80%, at least 85%, at least 90%, at least 95% homologous with the OX40 having the sequence of SEQ ID NO: 5. In several embodiments, the OX40 intracellular signaling domain comprises the amino acid sequence of SEQ ID NO: 6. In several embodiments, the OX40 intracellular signaling domain is truncated or modified and is at least 70%, at least 75%, at least 80%, at least 85%, at least 90%, at least 95% homologous with the OX40 intracellular signaling domain having the sequence of SEQ ID NO: 6. In several embodiments, OX40 is used as the sole transmembrane/signaling domain in the construct, however, in several embodiments, OX40 can be used with one or more other domains. For example, combinations of OX40 and CD3zeta are used in some embodiments. By way of further example, combinations of CD28, OX40, 4-1BB, and/or CD3zeta are used in some embodiments.

[0468] In several embodiments, the signaling domain comprises a 4-1BB domain. In several embodiments, the 4-1BB domain is an intracellular signaling domain. In several embodiments, the 4-1BB intracellular signaling domain is encoded by the nucleic acid sequence of SEQ ID NO: 29. In several embodiments, the 4-1BB intracellular signaling domain is truncated or modified and is at least 70%, at least 75%, at least 80%, at least 85%, at least 90%, at least 95% homologous with the 4-1BB intracellular signaling domain having the sequence of SEQ ID NO: 29. In several embodiments, 4-1BB is used as the sole transmembrane/signaling domain in the construct, however, in several embodiments, 4-1BB can be used with one or more other domains. For example, combinations of 4-1BB and CD3zeta are used in some embodiments. By way of further example, combinations of CD28, OX40, 4-1BB, and/or CD3zeta are used in some embodiments.

[0469] In several embodiments, the signaling domain comprises a CD28 domain. In several embodiments the CD28 domain is an intracellular signaling domain. In several embodiments, the CD28 intracellular signaling domain comprises the amino acid sequence of SEQ ID NO: 31. In several embodiments, the CD28 intracellular signaling domain is truncated or modified and is at least 70%, at least 75%, at least 80%, at least 85%, at least 90%, at least 95% homologous with the CD28 intracellular signaling domain having the sequence of SEQ ID NO: 31. In several embodiments, CD28 is used as the sole transmembrane/signaling domain in the construct, however, in several embodiments, CD28 can be used with one or more other domains. For example, combinations of CD28 and CD3zeta are used in some embodiments. By way of further example, combinations of CD28, OX40, 4-1BB, and/or CD3zeta are used in some embodiments.

[0470] In any of the provided embodiments, the nucleic acid encoding the chimeric receptor, or a portion thereof, is codon-optimized. In some embodiments, the polynucleotides are optimized, or contain certain features designed for optimization, such as for codon usage, to reduce RNA heterogeneity and/or to modify, e.g., increase or render more consistent among cell product lots, expression, such as surface expression, of the encoded receptor. In some embodiments, polynucleotides, encoding chimeric receptors, are modified as compared to a reference polynucleotide, such as to remove cryptic or hidden splice sites, to reduce RNA heterogeneity. In some embodiments, polynucleotides, encoding chimeric receptors, are codon optimized, such as for expression in a mammalian, e.g., human, cell such as in a human T cell. In some aspects, the modified polynucleotides result in in improved, e.g., increased or more uniform or more consistent level of, expression, e.g., surface expression, when expressed in a cell.

### Stimulatory Molecules

[0471] In some embodiments, the intracellular signaling domain of a chimeric receptor provided herein comprises a co-stimulatory signaling domain, including any of those as described in the preceding section. Thus, some embodiments of the compositions and methods described herein relate to chimeric receptors (e.g., tumor antigen-directed CARs and/or tumor ligand-directed chimeric receptors) that comprise a co-stimulatory domain. In addition to the various transmembrane domains and signaling domain (and the combination transmembrane/signaling domains), additional co-activating molecules (“stimulatory molecules”) can be provided, in several embodiments. These can be certain molecules that, for example, further enhance activity of the immune cells. Cytokines may be used in some embodiments. For example, certain interleukins, such as IL-2 and/or IL-15 as non-limiting examples, are used. In some embodiments, the immune cells for therapy are engineered to express such molecules as a secreted form. In additional embodiments, such stimulatory molecules are engineered to be membrane bound, acting as autocrine stimulatory molecules (or even as paracrine stimulators to neighboring cells).

[0472] In several embodiments, NK cells are engineered to express membrane-bound interleukin 15 (mbIL15). In such embodiments, mbIL15 expression on the NK enhances the cytotoxic effects of the engineered NK cell by enhancing the proliferation and/or longevity of the NK cells. In some embodiments, the IL15 is expressed from a separate cassette on the construct comprising any one of the CARs disclosed herein. In some embodiments, the IL15 is expressed from the same cassette as any one of the CARs disclosed herein. In some embodiments, the chimeric receptor and IL15 are separated by a nucleic acid sequence encoding a cleavage site, for example, a proteolytic cleavage site or a T2A, β2A, E2A, or F2A self-cleaving peptide cleavage site. In some embodiments, the chimeric receptor and IL15 are separated by a T2A sequence. In some embodiments, the IL15 is a membrane-bound IL15 (mbIL15). In several embodiments, T cells, such as the genetically engineered non-alloreactive T cells disclosed herein are engineered to express membrane-bound interleukin 15 (mbIL15). In such embodiments, mbIL15 expression on the T cell enhances the cytotoxic effects of the engineered T cell by enhancing the activity and/or propagation (e.g., longevity) of the engineered T cells. In some embodiments, the mbIL15 comprises a native IL15 sequence, such as a human native IL15 sequence, and at least one transmembrane domain. In several embodiments, IL15 is encoded by the nucleic acid sequence of SEQ ID NO: 11. In several embodiments, IL15 can be truncated or modified, such that it encoded by a nucleic acid sequence that is at least 70%, at least 75%, at least 80%, at least 85%, at least 90%, at least 95% homologous with the sequence of SEQ ID NO: 11. In several embodiments, the IL15 comprises the amino acid sequence of SEQ ID NO: 12. In several embodiments, the IL15 is truncated or modified and is at least 70%, at least 75%, at least 80%, at least 85%, at least 90%, at least 95% homologous with the IL15 having the sequence of SEQ ID NO: 12.

[0473] In some embodiments, the mbIL15 is membrane-bound by virtue of the fusion of IL15 to a transmembrane domain. Thus, in some embodiments, mbIL15 comprises a transmembrane domain. In some embodiments, the transmembrane domain comprises a CD8 transmembrane domain. In some embodiments, the mbIL15 may comprise additional components, such as a leader sequence and/or a hinge sequence. In some embodiments, the leader sequence is a CD8 leader sequence. In some embodiments, the hinge sequence is a CD8 hinge sequence. In some embodiments, the mbIL15 comprises a native IL15 sequence, such as a human native IL15 sequence, and at least one transmembrane domain. In several embodiments, mbIL15 is encoded by the nucleic acid sequence of SEQ ID NO: 489. In several embodiments, mbIL15 can be truncated or modified, such that it encoded by a nucleic acid sequence that is at least 70%, at least 75%, at least 80%, at least 85%, at least 90%, at least 95% homologous with the sequence of SEQ ID NO: 489. In several embodiments, the mbIL15 comprises the amino acid sequence of SEQ ID NO: 490. In several embodiments, the mbIL15 is truncated or modified and is at least 70%, at least 75%, at least 80%, at least 85%, at least 90%, at least 95% homologous with the mbIL15 having the sequence of SEQ ID NO: 490. It is contemplated that any of the amino acid sequences provided herein may be provided with or without a signal sequence (e.g., a CD8α signal sequence, such as MALPVTALLLPLALLLHAARP).

[0474] Membrane-bound IL15 sequences are described in PCT publications WO 2018/183385 and WO 2020/056045, each of which is hereby expressly incorporated by reference in its entirety.

[0475] In some embodiments, the tumor antigen-directed CARs and/or tumor ligand-directed chimeric receptors are encoded by a polynucleotide that includes one or more cytosolic protease cleavage sites, for example a T2A cleavage site, a P2A cleavage site, an E2A cleavage site, and/or a F2A cleavage site. Such sites are recognized and cleaved by a cytosolic protease, which can result in separation (and separate expression) of the various component parts of the receptor encoded by the polynucleotide. As a result, depending on the embodiment, the various constituent parts of an engineered cytotoxic receptor complex can be delivered to an NK cell or T cell in a single vector or by multiple vectors. Thus, as shown schematically, in the Figures, a construct can be encoded by a single polynucleotide, but also include a cleavage site, such that downstream elements of the constructs are expressed by the cells as a separate protein (as is the case in some embodiments with IL-15). In several embodiments, a T2A cleavage site is used. In several embodiments, a T2A cleavage site is encoded by the nucleic acid sequence of SEQ ID NO: 9. In several embodiments, T2A cleavage site can be truncated or modified, such that it is encoded by a nucleic acid sequence that is at least 70%, at least 75%, at least 80%, at least 85%, at least 90%, at least 95% homologous with the sequence of SEQ ID NO: 9. In several embodiments, the T2A cleavage site comprises the amino acid sequence of SEQ ID NO: 10. In several embodiments, the T2A cleavage site is truncated or modified. In several embodiments, the T2A cleavage site is truncated or modified and is at least 70%, at least 75%, at least 80%, at least 85%, at least 90%, at least 95% homologous with the T2A cleavage site having the sequence of SEQ ID NO: 10.

### Cytotoxic Receptor Complex Constructs

[0476] Some embodiments of the compositions and methods described herein relate to chimeric antigen receptors, such as a CD19-directed chimeric receptor, as well as chimeric receptors, such as an activating chimeric receptor (ACR) that targets a ligand of NKG2D. Unless otherwise indicated, a cytotoxic receptor complex shall refer either to a CAR or an ACR (an engineered complex as opposed to an endogenous (e.g., naturally occurring) cytotoxic receptor). The expression of these cytotoxic receptor complexes in immune cells, such as genetically modified non-alloreactive T cells and/or NK cells, allows the targeting and destruction of particular target cells, such as cancerous cells. Non-limiting examples of such cytotoxic receptor complexes are discussed in more detail below.

### Chimeric Antigen Receptor Cytotoxic Receptor Complex Constructs

[0477] In several embodiments, there are provided for herein a variety of cytotoxic receptor complexes (also referred to as cytotoxic receptors) are provided for herein with the general structure of a chimeric antigen receptor. FIGS. 1-7 schematically depict non-limiting schematics of constructs that include a tumor binding moiety that binds to a tumor antigen or tumor-associated antigen expressed on the surface of cancer cells and activates the engineered cell expressing the chimeric antigen receptor. FIG. 6 shows a schematic of a chimeric receptor complex, with an NKG2D activating chimeric receptor as a non-limiting example (see NKG2D ACRa and ACRb). FIG. 6 shows a schematic of a bispecific CAR/chimeric receptor complex, with an NKG2D activating chimeric receptor as a non-limiting example (see Bi-spec CAR/ACRa and CAR/ACRb).

[0478] As shown in the figures, several embodiments of the chimeric receptor include an anti-tumor binder, a CD8α hinge domain, an Ig4 SH domain (or hinge), a CD8α transmembrane domain, a CD28 transmembrane domain, an OX40 domain, a 4-1BB domain, a CD28 domain, a CD3ζ ITAM domain or subdomain, a CD3zeta domain, an NKp80 domain, a CD16 IC domain, a 2A cleavage site, and a membrane-bound IL-15 domain (though, as above, in several embodiments soluble IL-15 is used). In several embodiments, the binding and activation functions are engineered to be performed by separate domains. Several embodiments relate to complexes with more than one tumor binder moiety or other binder/activation moiety. In some embodiments, the binder/activation moiety targets other markers besides CD19, such as a cancer target described herein. For example, FIGS. 6 and 7 depict schematics of non-limiting examples of CAR constructs that target different antigens, such as CD123, CLDN6, BCMA, HER2, CD70, Mesothelia, PD-L1, and EGFR. In several embodiments, the general structure of the chimeric antigen receptor construct includes a hinge and/or transmembrane domain. These may, in some embodiments, be fulfilled by a single domain, or a plurality of subdomains may be used, in several embodiments. The receptor complex further comprises a signaling domain, which transduces signals after binding of the homing moiety to the target cell, ultimately leading to the cytotoxic effects on the target cell. In several embodiments, the complex further comprises a co-stimulatory domain, which operates, synergistically, in several embodiments, to enhance the function of the signaling domain. Expression of these complexes in immune cells, such as T cells and/or NK cells, allows the targeting and destruction of particular target cells, such as cancerous cells that express a given tumor marker. Some such receptor complexes comprise an extracellular domain comprising an anti-CD19 moiety, or CD19-binding moiety, that binds CD19 on the surface of target cells and activates the engineered cell. The CD3zeta ITAM subdomain may act in concert as a signaling domain. The IL-15 domain, e.g., mbIL-15 domain, may act as a co-stimulatory domain. The IL-15 domain, e.g. mbIL-15 domain, may render immune cells (e.g., NK or T cells) expressing it particularly efficacious against target tumor cells. It shall be appreciated that the IL-15 domain, such as an mbIL-15 domain, can, in accordance with several embodiments, be encoded on a separate construct. Additionally, each of the components may be encoded in one or more separate constructs. In some embodiments, the cytotoxic receptor or CD19-directed receptor comprises a sequence of amino acids that is at least 70%, 75%, 80%, 85%, 90%, 91%, 92%, 93%, 94%, 95%, 96%, 97%, 98%, 99%, or more, or a range defined by any two of the aforementioned percentages, identical to the sequence of SEQ ID NO: 34. In some embodiments, the cytotoxic receptor or CD19-directed receptor comprises the amino acid sequence set forth in SEQ ID NO:34.

[0479] Depending on the embodiment, various binders can be used to target CD19. In several embodiments, peptide binders are used, while in some embodiments antibodies, or fragments thereof are used. In several embodiments employing antibodies, antibody sequences are optimized, humanized or otherwise manipulated or mutated from their native form in order to increase one or more of stability, affinity, avidity or other characteristic of the antibody or fragment. In several embodiments, an antibody is provided that is specific for CD19. In several embodiments, an scFv is provided that is specific for CD19. In several embodiments, the antibody or scFv specific for CD19 comprises a heavy chain variable comprising the amino acid sequence of SEQ ID NO: 104 or 106. In some embodiments, the heavy chain variable comprises a sequence of amino acids that is at least 70%, 75%, 80%, 85%, 90%, 91%, 92%, 93%, 94%, 95%, 96%, 97%, 98%, 99%, or more, identical to the sequence of SEQ ID NO. 104 or 106. In some embodiments, the heavy chain variable comprises a sequence of amino acids that is encoded by a polynucleotide that hybridizes under moderately stringent conditions to the complement of a polynucleotide that encodes a heavy chain variable of SEQ ID NO. 104 or 106. In some embodiments, the heavy chain variable domain a sequence of amino acids that is encoded by a polynucleotide that hybridizes under stringent conditions to the complement of a polynucleotide that encodes a heavy chain variable encodes a heavy chain variable of SEQ ID NO. 104 or 106. In several embodiments, the heavy chain variable region comprises the CDR-H1, the CDRH-2, and the CDRH-3 as comprised within the amino acid sequence set forth in SEQ ID NO:104. In several embodiments, the heavy chain variable region comprises the CDR-H1, the CDRH-2, and the CDRH-3 as comprised within the amino acid sequence set forth in SEQ ID NO:106.

[0480] In several embodiments, the antibody or scFv specific for CD19 comprises a light chain variable comprising the amino acid sequence of any of SEQ ID NO. 105 or 107. In several embodiments, the light chain variable comprises a sequence of amino acids that is encoded by a nucleotide sequence that is at least 70%, 75%, 80%, 85%, 90%, 91%, 92%, 93%, 94%, 95%, 96%, 97%, 98%, 99%, or more, identical to the identical to the sequence of SEQ ID NO. 105 or 107. In some embodiments, the light chain variable comprises a sequence of amino acids that is encoded by a polynucleotide that hybridizes under moderately stringent conditions to the complement of a polynucleotide that encodes a light chain variable of SEQ ID NO. 105 or 107. In some embodiments, the light chain variable domain comprises a sequence of amino acids that is encoded by a polynucleotide that hybridizes under stringent conditions to the complement of a polynucleotide that encodes a light chain variable domain of SEQ ID NO. 105 or 107. In several embodiments, the light chain variable region comprises the CDR-L1, the CDRL-2, and the CDRL-3 as comprised within the amino acid sequence set forth in SEQ ID NO:105. In several embodiments, the lightchain variable region comprises the CDR-L1, the CDRL-2, and the CDRL-3 as comprised within the amino acid sequence set forth in SEQ ID NO:107.

[0481] In several embodiments, the anti-CD19 antibody or scFv comprises one, two, or three heavy chain complementarity determining region (CDR) and one, two, or three light chain CDRs. In several embodiments, a first heavy chain CDR has the amino acid sequence of SEQ ID NO: 111. In some embodiments, the first heavy chain CDR comprises a sequence of amino acids that is at least 70%, 75%, 80%, 85%, 90%, 91%, 92%, 93%, 94%, 95%, 96%, 97%, 98%, 99%, or more, identical to the sequence of SEQ ID NO. 111. In several embodiments, a second heavy chain CDR has the amino acid sequence of SEQ ID NO: 112, 113, or 114. In some embodiments, the second heavy chain CDR comprises a sequence of amino acids that is at least 70%, 75%, 80%, 85%, 90%, 91%, 92%, 93%, 94%, 95%, 96%, 97%, 98%, 99%, or more, identical to the sequence of SEQ ID NO. 112, 113, or 114. In several embodiments, a third heavy chain CDR has the amino acid sequence of SEQ ID NO: 115. In some embodiments, the third heavy chain CDR comprises a sequence of amino acids that is at least 70%, 75%, 80%, 85%, 90%, 91%, 92%, 93%, 94%, 95%, 96%, 97%, 98%, 99%, or more, identical to the sequence of SEQ ID NO. 115.

[0482] In several embodiments, a first light chain CDR has the amino acid sequence of SEQ ID NO: 108. In some embodiments, the first light chain CDR comprises a sequence of amino acids that is at least 70%, 75%, 80%, 85%, 90%, 91%, 92%, 93%, 94%, 95%, 96%, 97%, 98%, 99%, or more, identical to the sequence of SEQ ID NO. 108. In several embodiments, a second light chain CDR has the amino acid sequence of SEQ ID NO: 109. In some embodiments, the second light chain CDR comprises a sequence of amino acids that is at least 70%, 75%, 80%, 85%, 90%, 91%, 92%, 93%, 94%, 95%, 96%, 97%, 98%, 99%, or more, identical to the sequence of SEQ ID NO. 109. In several embodiments, a third light chain CDR has the amino acid sequence of SEQ ID NO: 110. In some embodiments, the third light chain CDR comprises a sequence of amino acids that is at least 70%, 75%, 80%, 85%, 90%, 91%, 92%, 93%, 94%, 95%, 96%, 97%, 98%, 99% or more, identical to the sequence of SEQ ID NO. 110.

[0483] In several embodiments, there is provided an anti-CD19 CAR comprising the amino acid sequence of SEQ ID NO. 116. In some embodiments, there is provided an anti-CD19 CAR comprising a sequence of amino acids that is at least 70%, 75%, 80%, 85%, 90%, 91%, 92%, 93%, 94%, 95%, 96%, 97%, 98%, 99% or more, identical to the sequence of SEQ ID NO. 116.

[0484] In one embodiment, there is provided a polynucleotide encoding a Tumor Binder/CD8hinge-CD8TM/OX40/CD3zeta chimeric antigen receptor complex (see FIG. 1, CAR1c). The polynucleotide comprises or is composed of tumor binder, a CD8α hinge, a CD8α transmembrane domain, an OX40 domain, and a CD3zeta domain as described herein. In several embodiments, this receptor complex is encoded by a nucleic acid molecule comprising a sequence obtained from a combination of sequences disclosed herein, or comprises an amino acid sequence obtained from a combination of sequences disclosed herein. In several embodiments, the encoding nucleic acid sequence, or the amino acid sequence, comprises a sequence in accordance with one or more SEQ ID NOS as described herein, such as those included herein as examples of constituent parts. In several embodiments, the encoding nucleic acid sequence, or the amino acid sequence, comprises a sequence that shares at least about 90%, at least about 94%, at least about 95%, at least about 96%, at least about 97%, at least about 98%, or at least about 99%, sequence identity, homology and/or functional equivalence with a sequence resulting from the combination one or more SEQ ID NOS as described herein. It shall be appreciated that certain sequence variability, extensions, and/or truncations of the disclosed sequences may result when combining sequences, as a result of, for example, ease or efficiency in cloning (e.g., for creation of a restriction site).

[0485] In several embodiments, there is provided a polynucleotide encoding a tumor binder/CD8hinge-CD8TM/OX40/CD3zeta/2A/mIL-15 chimeric antigen receptor complex (see FIG. 1, CAR Id). The polynucleotide comprises or is composed of a Tumor Binder, a CD8α hinge, a CD8α transmembrane domain, an OX40 domain, a CD3zeta domain, a 2A cleavage site, and an mIL-15 domain as described herein. In several embodiments, this receptor complex is encoded by a nucleic acid molecule comprising a sequence obtained from a combination of sequences disclosed herein, or comprises an amino acid sequence obtained from a combination of sequences disclosed herein. In several embodiments, the encoding nucleic acid sequence, or the amino acid sequence, comprises a sequence in accordance with one or more SEQ ID NOS as described herein, such as those included herein as examples of constituent parts. In several embodiments, the encoding nucleic acid sequence, or the amino acid sequence, comprises a sequence that shares at least about 90%, at least about 94%, at least about 95%, at least about 96%, at least about 97%, at least about 98%, or at least about 99%, sequence identity, homology and/or functional equivalence with a sequence resulting from the combination one or more SEQ ID NOS as described herein. It shall be appreciated that certain sequence variability, extensions, and/or truncations of the disclosed sequences may result when combining sequences, as a result of, for example, ease or efficiency in cloning (e.g., for creation of a restriction site).

[0486] In several embodiments, there is provided a polynucleotide encoding a Tumor Binder/Ig4SH-CD8TM/4-1BB/CD3zeta chimeric antigen receptor complex (see FIG. 4, CAR4a). The polynucleotide comprises or is composed of a Tumor Binder, an Ig4 SH domain, a CD8α transmembrane domain, a 4-1BB domain, and a CD3zeta domain as described herein. In several embodiments, this receptor complex is encoded by a nucleic acid molecule comprising a sequence obtained from a combination of sequences disclosed herein, or comprises an amino acid sequence obtained from a combination of sequences disclosed herein. In several embodiments, the encoding nucleic acid sequence, or the amino acid sequence, comprises a sequence in accordance with one or more SEQ ID NOS as described herein, such as those included herein as examples of constituent parts. In several embodiments, the encoding nucleic acid sequence, or the amino acid sequence, comprises a sequence that shares at least about 90%, at least about 94%, at least about 95%, at least about 96%, at least about 97%, at least about 98%, or at least about 99%, sequence identity, homology and/or functional equivalence with a sequence resulting from the combination one or more SEQ ID NOS as described herein. It shall be appreciated that certain sequence variability, extensions, and/or truncations of the disclosed sequences may result when combining sequences, as a result of, for example, ease or efficiency in cloning (e.g., for creation of a restriction site).

[0487] In several embodiments, there is provided a polynucleotide encoding a Tumor Binder/Ig4SH-CD8TM/4-1BB/CD3zeta/2A/mIL-15 chimeric antigen receptor complex (see FIG. 4, CAR4b). The polynucleotide comprises or is composed of a Tumor Binder, a Ig4 SH domain, a CD8a transmembrane domain, a 4-1BB domain, a CD3zeta domain, a 2A cleavage site, and an mIL-15 domain as described herein. In several embodiments, this receptor complex is encoded by a nucleic acid molecule comprising a sequence obtained from a combination of sequences disclosed herein, or comprises an amino acid sequence obtained from a combination of sequences disclosed herein. In several embodiments, the encoding nucleic acid sequence, or the amino acid sequence, comprises a sequence in accordance with one or more SEQ ID NOS as described herein, such as those included herein as examples of constituent parts. In several embodiments, the encoding nucleic acid sequence, or the amino acid sequence, comprises a sequence that shares at least about 90%, at least about 94%, at least about 95%, at least about 96%, at least about 97%, at least about 98%, or at least about 99%, sequence identity, homology and/or functional equivalence with a sequence resulting from the combination one or more SEQ ID NOS as described herein. It shall be appreciated that certain sequence variability, extensions, and/or truncations of the disclosed sequences may result when combining sequences, as a result of, for example, ease or efficiency in cloning (e.g., for creation of a restriction site).

[0488] In several embodiments, there is provided a polynucleotide encoding a Tumor Binder/CD8hinge-CD28TM/CD28/CD3zeta chimeric antigen receptor complex (see FIG. 1, CAR1e). The polynucleotide comprises or is composed of a Tumor Binder, a CD8a hinge, a CD28 transmembrane domain, a CD28 domain, and a CD3zeta domain as described herein. In several embodiments, this receptor complex is encoded by a nucleic acid molecule comprising a sequence obtained from a combination of sequences disclosed herein, or comprises an amino acid sequence obtained from a combination of sequences disclosed herein. In several embodiments, the encoding nucleic acid sequence, or the amino acid sequence, comprises a sequence in accordance with one or more SEQ ID NOS as described herein, such as those included herein as examples of constituent parts. In several embodiments, the encoding nucleic acid sequence, or the amino acid sequence, comprises a sequence that shares at least about 90%, at least about 94%, at least about 95%, at least about 96%, at least about 97%, at least about 98%, or at least about 99%, sequence identity, homology and/or functional equivalence with a sequence resulting from the combination one or more SEQ ID NOS as described herein. It shall be appreciated that certain sequence variability, extensions, and/or truncations of the disclosed sequences may result when combining sequences, as a result of, for example, ease or efficiency in cloning (e.g., for creation of a restriction site).

[0489] In several embodiments, there is provided a polynucleotide encoding a Tumor Binder/CD8hinge-CD28TM/CD28/CD3zeta/2A/mIL-15 chimeric antigen receptor complex (see FIG. 1, CAR1f). The polynucleotide comprises or is composed of a Tumor Binder, a CD8a hinge, a CD28 transmembrane domain, a CD28 domain, a CD3zeta domain, a 2A cleavage site, and an mIL-15 domain as described herein. In several embodiments, this receptor complex is encoded by a nucleic acid molecule comprising a sequence obtained from a combination of sequences disclosed herein, or comprises an amino acid sequence obtained from a combination of sequences disclosed herein. In several embodiments, the encoding nucleic acid sequence, or the amino acid sequence, comprises a sequence in accordance with one or more SEQ ID NOS as described herein, such as those included herein as examples of constituent parts. In several embodiments, the encoding nucleic acid sequence, or the amino acid sequence, comprises a sequence that shares at least about 90%, at least about 94%, at least about 95%, at least about 96%, at least about 97%, at least about 98%, or at least about 99%, sequence identity, homology and/or functional equivalence with a sequence resulting from the combination one or more SEQ ID NOS as described herein. It shall be appreciated that certain sequence variability, extensions, and/or truncations of the disclosed sequences may result when combining sequences, as a result of, for example, ease or efficiency in cloning (e.g., for creation of a restriction site).

[0490] In several embodiments, there is provided a polynucleotide encoding a Tumor Binder/Ig4SH-CD28TM/CD28/CD3zeta chimeric antigen receptor complex (see FIG. 2, CAR2i). The polynucleotide comprises or is composed of a Tumor Binder, an Ig4 SH domain, a CD28 transmembrane domain, a CD28 domain, and a CD3zeta domain as described herein. In several embodiments, this receptor complex is encoded by a nucleic acid molecule comprising a sequence obtained from a combination of sequences disclosed herein, or comprises an amino acid sequence obtained from a combination of sequences disclosed herein. In several embodiments, the encoding nucleic acid sequence, or the amino acid sequence, comprises a sequence in accordance with one or more SEQ ID NOS as described herein, such as those included herein as examples of constituent parts. In several embodiments, the encoding nucleic acid sequence, or the amino acid sequence, comprises a sequence that shares at least about 90%, at least about 94%, at least about 95%, at least about 96%, at least about 97%, at least about 98%, or at least about 99%, sequence identity, homology and/or functional equivalence with a sequence resulting from the combination one or more SEQ ID NOS as described herein. It shall be appreciated that certain sequence variability, extensions, and/or truncations of the disclosed sequences may result when combining sequences, as a result of, for example, ease or efficiency in cloning (e.g., for creation of a restriction site).

[0491] In several embodiments, there is provided a polynucleotide encoding a Tumor Binder/Ig4SH-CD28TM/CD28/CD3zeta/2A/mIL-15 chimeric antigen receptor complex (see FIG. 2, CAR2j). The polynucleotide comprises or is composed of a Tumor Binder, an Ig4 SH domain, a CD28 transmembrane domain, a CD28 domain, a CD3zeta domain, a 2A cleavage site, and an mIL-15 domain as described herein. In several embodiments, this receptor complex is encoded by a nucleic acid molecule comprising a sequence obtained from a combination of sequences disclosed herein, or comprises an amino acid sequence obtained from a combination of sequences disclosed herein. In several embodiments, the encoding nucleic acid sequence, or the amino acid sequence, comprises a sequence in accordance with one or more SEQ ID NOS as described herein, such as those included herein as examples of constituent parts. In several embodiments, the encoding nucleic acid sequence, or the amino acid sequence, comprises a sequence that shares at least about 90%, at least about 94%, at least about 95%, at least about 96%, at least about 97%, at least about 98%, or at least about 99%, sequence identity, homology and/or functional equivalence with a sequence resulting from the combination one or more SEQ ID NOS as described herein. It shall be appreciated that certain sequence variability, extensions, and/or truncations of the disclosed sequences may result when combining sequences, as a result of, for example, ease or efficiency in cloning (e.g., for creation of a restriction site).

[0492] In several embodiments, there is provided a polynucleotide encoding a Tumor Binder/Ig4SH-CD8TM/OX40/CD3zeta chimeric antigen receptor complex (see FIG. 4, CAR4c). The polynucleotide comprises or is composed of a Tumor Binder, a Ig4 SH domain, a CD8a transmembrane domain, an OX40 domain, and a CD3zeta domain as described herein. In several embodiments, this receptor complex is encoded by a nucleic acid molecule comprising a sequence obtained from a combination of sequences disclosed herein, or comprises an amino acid sequence obtained from a combination of sequences disclosed herein. In several embodiments, the encoding nucleic acid sequence, or the amino acid sequence, comprises a sequence in accordance with one or more SEQ ID NOS as described herein, such as those included herein as examples of constituent parts. In several embodiments, the encoding nucleic acid sequence, or the amino acid sequence, comprises a sequence that shares at least about 90%, at least about 94%, at least about 95%, at least about 96%, at least about 97%, at least about 98%, or at least about 99%, sequence identity, homology and/or functional equivalence with a sequence resulting from the combination one or more SEQ ID NOS as described herein. It shall be appreciated that certain sequence variability, extensions, and/or truncations of the disclosed sequences may result when combining sequences, as a result of, for example, ease or efficiency in cloning (e.g., for creation of a restriction site).

[0493] In several embodiments, there is provided a polynucleotide encoding a Tumor Binder/Ig4SH-CD8TM/OX40/CD3zeta/2A/mIL-15 chimeric antigen receptor complex (see FIG. 4, CAR4d). The polynucleotide comprises or is composed of a Tumor Binder, a Ig4 SH domain, a CD8a transmembrane domain, an OX40 domain, a CD3zeta domain, a 2A cleavage site, and an mIL-15 domain as described herein. In several embodiments, this receptor complex is encoded by a nucleic acid molecule comprising a sequence obtained from a combination of sequences disclosed herein, or comprises an amino acid sequence obtained from a combination of sequences disclosed herein. In several embodiments, the encoding nucleic acid sequence, or the amino acid sequence, comprises a sequence in accordance with one or more SEQ ID NOS as described herein, such as those included herein as examples of constituent parts. In several embodiments, the encoding nucleic acid sequence, or the amino acid sequence, comprises a sequence that shares at least about 90%, at least about 94%, at least about 95%, at least about 96%, at least about 97%, at least about 98%, or at least about 99%, sequence identity, homology and/or functional equivalence with a sequence resulting from the combination one or more SEQ ID NOS as described herein. It shall be appreciated that certain sequence variability, extensions, and/or truncations of the disclosed sequences may result when combining sequences, as a result of, for example, ease or efficiency in cloning (e.g., for creation of a restriction site).

[0494] In several embodiments, there is provided a polynucleotide encoding a Tumor Binder/CD8hinge-CD3αTM/CD28/CD3zeta chimeric antigen receptor complex (see FIG. 4, CAR4e). The polynucleotide comprises or is composed of a Tumor Binder, a CD8a hinge, a CD3α transmembrane domain, a CD28 domain, and a CD3zeta domain as described herein. In several embodiments, this receptor complex is encoded by a nucleic acid molecule comprising a sequence obtained from a combination of sequences disclosed herein, or comprises an amino acid sequence obtained from a combination of sequences disclosed herein. In several embodiments, the encoding nucleic acid sequence, or the amino acid sequence, comprises a sequence in accordance with one or more SEQ ID NOS as described herein, such as those included herein as examples of constituent parts. In several embodiments, the encoding nucleic acid sequence, or the amino acid sequence, comprises a sequence that shares at least about 90%, at least about 94%, at least about 95%, at least about 96%, at least about 97%, at least about 98%, or at least about 99%, sequence identity, homology and/or functional equivalence with a sequence resulting from the combination one or more SEQ ID NOS as described herein. It shall be appreciated that certain sequence variability, extensions, and/or truncations of the disclosed sequences may result when combining sequences, as a result of, for example, ease or efficiency in cloning (e.g., for creation of a restriction site).

[0495] In several embodiments, there is provided a polynucleotide encoding a Tumor Binder/CD8hinge-CD3αTM/CD28/CD3zeta/2A/mIL-15 chimeric antigen receptor complex (see FIG. 4, CAR4f). The polynucleotide comprises or is composed of a Tumor Binder, a CD8a hinge, a CD3α transmembrane domain, a CD28 domain, a CD3zeta domain, a 2A cleavage site, and an mIL-15 domain as described herein. In several embodiments, this receptor complex is encoded by a nucleic acid molecule comprising a sequence obtained from a combination of sequences disclosed herein, or comprises an amino acid sequence obtained from a combination of sequences disclosed herein. In several embodiments, the encoding nucleic acid sequence, or the amino acid sequence, comprises a sequence in accordance with one or more SEQ ID NOS as described herein, such as those included herein as examples of constituent parts. In several embodiments, the encoding nucleic acid sequence, or the amino acid sequence, comprises a sequence that shares at least about 90%, at least about 94%, at least about 95%, at least about 96%, at least about 97%, at least about 98%, or at least about 99%, sequence identity, homology and/or functional equivalence with a sequence resulting from the combination one or more SEQ ID NOS as described herein. It shall be appreciated that certain sequence variability, extensions, and/or truncations of the disclosed sequences may result when combining sequences, as a result of, for example, ease or efficiency in cloning (e.g., for creation of a restriction site).

[0496] In several embodiments, there is provided a polynucleotide encoding a Tumor Binder/CD8hinge-CD28TM/CD28/4-1BB/CD3zeta chimeric antigen receptor complex (see FIG. 4, CAR 4g). The polynucleotide comprises or is composed of a Tumor Binder, a CD8a hinge, a CD28 transmembrane domain, a CD28 domain, a 4-1BB domain, and a CD3zeta domain as described herein. In several embodiments, this receptor complex is encoded by a nucleic acid molecule comprising a sequence obtained from a combination of sequences disclosed herein, or comprises an amino acid sequence obtained from a combination of sequences disclosed herein. In several embodiments, the encoding nucleic acid sequence, or the amino acid sequence, comprises a sequence in accordance with one or more SEQ ID NOS as described herein, such as those included herein as examples of constituent parts. In several embodiments, the encoding nucleic acid sequence, or the amino acid sequence, comprises a sequence that shares at least about 90%, at least about 94%, at least about 95%, at least about 96%, at least about 97%, at least about 98%, or at least about 99%, sequence identity, homology and/or functional equivalence with a sequence resulting from the combination one or more SEQ ID NOS as described herein. It shall be appreciated that certain sequence variability, extensions, and/or truncations of the disclosed sequences may result when combining sequences, as a result of, for example, ease or efficiency in cloning (e.g., for creation of a restriction site).

[0497] In several embodiments, there is provided a polynucleotide encoding a Tumor Binder/CD8hinge-CD28TM/CD28/4-1BB/CD3zeta/2A/mIL-15 chimeric antigen receptor complex (see FIG. 4, CAR 4h). The polynucleotide comprises or is composed of a Tumor Binder, a CD8a hinge, a CD28 transmembrane domain, a CD28 domain, a 4-1BB domain, a CD3zeta domain, a 2A cleavage site, and an mIL-15 domain as described herein. In several embodiments, this receptor complex is encoded by a nucleic acid molecule comprising a sequence obtained from a combination of sequences disclosed herein, or comprises an amino acid sequence obtained from a combination of sequences disclosed herein. In several embodiments, the encoding nucleic acid sequence, or the amino acid sequence, comprises a sequence in accordance with one or more SEQ ID NOS as described herein, such as those included herein as examples of constituent parts. In several embodiments, the encoding nucleic acid sequence, or the amino acid sequence, comprises a sequence that shares at least about 90%, at least about 94%, at least about 95%, at least about 96%, at least about 97%, at least about 98%, or at least about 99%, sequence identity, homology and/or functional equivalence with a sequence resulting from the combination one or more SEQ ID NOS as described herein. It shall be appreciated that certain sequence variability, extensions, and/or truncations of the disclosed sequences may result when combining sequences, as a result of, for example, ease or efficiency in cloning (e.g., for creation of a restriction site).

[0498] In several embodiments, there is provided a polynucleotide encoding a Tumor Binder/CD8 alpha hinge/CD8 alpha TM/4-1BB/CD3zeta chimeric antigen receptor complex (see FIG. 5, CAR5a). The polynucleotide comprises or is composed of an anti-CD19 moiety, a CD8a hinge, a CD8a transmembrane domain, a 4-1BB domain, and a CD3zeta domain as described herein. In several embodiments, this receptor complex is encoded by a nucleic acid molecule comprising a sequence obtained from a combination of sequences disclosed herein, or comprises an amino acid sequence obtained from a combination of sequences disclosed herein. In several embodiments, the encoding nucleic acid sequence, or the amino acid sequence, comprises a sequence in accordance with one or more SEQ ID NOS as described herein, such as those included herein as examples of constituent parts. In several embodiments, the encoding nucleic acid sequence, or the amino acid sequence, comprises a sequence that shares at least about 90%, at least about 94%, at least about 95%, at least about 96%, at least about 97%, at least about 98%, or at least about 99%, sequence identity, homology and/or functional equivalence with a sequence resulting from the combination one or more SEQ ID NOS as described herein. It shall be appreciated that certain sequence variability, extensions, and/or truncations of the disclosed sequences may result when combining sequences, as a result of, for example, ease or efficiency in cloning (e.g., for creation of a restriction site).

[0499] In several embodiments, there is provided a polynucleotide encoding a Tumor Binder/CD8 alpha hinge/CD8 alpha TM/4-1BB/CD3zeta/2A/mIL-15 chimeric antigen receptor complex (see FIG. 5, CAR 5b). The polynucleotide comprises or is composed of a Tumor Binder, a CD8a hinge, a CD8a transmembrane domain, a 4-1BB domain, a CD3zeta domain, a 2A cleavage site, and an mIL-15 domain as described herein. In several embodiments, this receptor complex is encoded by a nucleic acid molecule comprising a sequence obtained from a combination of sequences disclosed herein, or comprises an amino acid sequence obtained from a combination of sequences disclosed herein. In several embodiments, the encoding nucleic acid sequence, or the amino acid sequence, comprises a sequence in accordance with one or more SEQ ID NOS as described herein, such as those included herein as examples of constituent parts. In several embodiments, the encoding nucleic acid sequence, or the amino acid sequence, comprises a sequence that shares at least about 90%, at least about 94%, at least about 95%, at least about 96%, at least about 97%, at least about 98%, or at least about 99%, sequence identity, homology and/or functional equivalence with a sequence resulting from the combination one or more SEQ ID NOS as described herein. It shall be appreciated that certain sequence variability, extensions, and/or truncations of the disclosed sequences may result when combining sequences, as a result of, for example, ease or efficiency in cloning (e.g., for creation of a restriction site).

[0500] In several embodiments, there is provided a polynucleotide encoding a Tumor Binder/CD8 alpha hinge/CD3 TM/4-1BB/CD3zeta chimeric antigen receptor complex (see FIG. 5, CAR5c). The polynucleotide comprises or is composed of a Tumor Binder, a CD8a hinge, a CD3 transmembrane domain, a 4-1BB domain, and a CD3zeta domain as described herein. In several embodiments, this receptor complex is encoded by a nucleic acid molecule comprising a sequence obtained from a combination of sequences disclosed herein, or comprises an amino acid sequence obtained from a combination of sequences disclosed herein. In several embodiments, the encoding nucleic acid sequence, or the amino acid sequence, comprises a sequence in accordance with one or more SEQ ID NOS as described herein, such as those included herein as examples of constituent parts. In several embodiments, the encoding nucleic acid sequence, or the amino acid sequence, comprises a sequence that shares at least about 90%, at least about 94%, at least about 95%, at least about 96%, at least about 97%, at least about 98%, or at least about 99%, sequence identity, homology and/or functional equivalence with a sequence resulting from the combination one or more SEQ ID NOS as described herein. It shall be appreciated that certain sequence variability, extensions, and/or truncations of the disclosed sequences may result when combining sequences, as a result of, for example, ease or efficiency in cloning (e.g., for creation of a restriction site).

[0501] In several embodiments, there is provided a polynucleotide encoding a Tumor Binder/CD8 alpha hinge/CD3 TM/4-1BB/CD3zeta/2A/mIL-15 chimeric antigen receptor complex (see FIG. 5, CAR5d). The polynucleotide comprises or is composed of a Tumor Binder, a CD8a hinge, a CD8a transmembrane domain, a 4-1BB domain, a CD3zeta domain, a 2A cleavage site, and an mIL-15 domain as described herein. In several embodiments, this receptor complex is encoded by a nucleic acid molecule comprising a sequence obtained from a combination of sequences disclosed herein, or comprises an amino acid sequence obtained from a combination of sequences disclosed herein. In several embodiments, the encoding nucleic acid sequence, or the amino acid sequence, comprises a sequence in accordance with one or more SEQ ID NOS as described herein, such as those included herein as examples of constituent parts. In several embodiments, the encoding nucleic acid sequence, or the amino acid sequence, comprises a sequence that shares at least about 90%, at least about 94%, at least about 95%, at least about 96%, at least about 97%, at least about 98%, or at least about 99%, sequence identity, homology and/or functional equivalence with a sequence resulting from the combination one or more SEQ ID NOS as described herein. It shall be appreciated that certain sequence variability, extensions, and/or truncations of the disclosed sequences may result when combining sequences, as a result of, for example, ease or efficiency in cloning (e.g., for creation of a restriction site).

[0502] In several embodiments, there is provided a polynucleotide encoding a Tumor Binder/CD8 alpha hinge/CD3 TM/4-1BB/NKp80 chimeric antigen receptor complex (see FIG. 5, CAR5e). The polynucleotide comprises or is composed of a Tumor Binder, a CD8a hinge, a CD3 transmembrane domain, a 4-1BB domain, and an NKp80 domain as described herein. In several embodiments, this receptor complex is encoded by a nucleic acid molecule comprising a sequence obtained from a combination of sequences disclosed herein, or comprises an amino acid sequence obtained from a combination of sequences disclosed herein. In several embodiments, the encoding nucleic acid sequence, or the amino acid sequence, comprises a sequence in accordance with one or more SEQ ID NOS as described herein, such as those included herein as examples of constituent parts. In several embodiments, the encoding nucleic acid sequence, or the amino acid sequence, comprises a sequence that shares at least about 90%, at least about 94%, at least about 95%, at least about 96%, at least about 97%, at least about 98%, or at least about 99%, sequence identity, homology and/or functional equivalence with a sequence resulting from the combination one or more SEQ ID NOS as described herein. It shall be appreciated that certain sequence variability, extensions, and/or truncations of the disclosed sequences may result when combining sequences, as a result of, for example, ease or efficiency in cloning (e.g., for creation of a restriction site).

[0503] In several embodiments, there is provided a polynucleotide encoding a Tumor Binder/CD8 alpha hinge/CD3 TM/4-1BB/NKp80/2A/mIL-15 chimeric antigen receptor complex (see FIG. 5, CAR5f). The polynucleotide comprises or is composed of a Tumor Binder, a CD8a hinge, a CD8a transmembrane domain, a 4-1BB domain, an NKp80 domain, a 2A cleavage site, and an mIL-15 domain as described herein. In several embodiments, this receptor complex is encoded by a nucleic acid molecule comprising a sequence obtained from a combination of sequences disclosed herein, or comprises an amino acid sequence obtained from a combination of sequences disclosed herein. In several embodiments, the encoding nucleic acid sequence, or the amino acid sequence, comprises a sequence in accordance with one or more SEQ ID NOS as described herein, such as those included herein as examples of constituent parts. In several embodiments, the encoding nucleic acid sequence, or the amino acid sequence, comprises a sequence that shares at least about 90%, at least about 94%, at least about 95%, at least about 96%, at least about 97%, at least about 98%, or at least about 99%, sequence identity, homology and/or functional equivalence with a sequence resulting from the combination one or more SEQ ID NOS as described herein. It shall be appreciated that certain sequence variability, extensions, and/or truncations of the disclosed sequences may result when combining sequences, as a result of, for example, ease or efficiency in cloning (e.g., for creation of a restriction site).

[0504] In several embodiments, there is provided a polynucleotide encoding a Tumor Binder/CD8 alpha hinge/CD3 TM/CD16 intracellular domain/4-1BB chimeric antigen receptor complex (see FIG. 5, CAR5g). The polynucleotide comprises or is composed of a Tumor Binder, a CD8a hinge, a CD3 transmembrane domain, CD16 intracellular domain, and a 4-1BB domain as described herein. In several embodiments, this receptor complex is encoded by a nucleic acid molecule comprising a sequence obtained from a combination of sequences disclosed herein, or comprises an amino acid sequence obtained from a combination of sequences disclosed herein. In several embodiments, the encoding nucleic acid sequence, or the amino acid sequence, comprises a sequence in accordance with one or more SEQ ID NOS as described herein, such as those included herein as examples of constituent parts. In several embodiments, the encoding nucleic acid sequence, or the amino acid sequence, comprises a sequence that shares at least about 90%, at least about 94%, at least about 95%, at least about 96%, at least about 97%, at least about 98%, or at least about 99%, sequence identity, homology and/or functional equivalence with a sequence resulting from the combination one or more SEQ ID NOS as described herein. It shall be appreciated that certain sequence variability, extensions, and/or truncations of the disclosed sequences may result when combining sequences, as a result of, for example, ease or efficiency in cloning (e.g., for creation of a restriction site).

[0505] In several embodiments, there is provided a polynucleotide encoding a Tumor Binder/CD8 alpha hinge/CD3 TM/CD16/4-1BB/2A/mIL-15 chimeric antigen receptor complex (see FIG. 5, CAR5h). The polynucleotide comprises or is composed of a Tumor Binder, a CD8a hinge, a CD8a transmembrane domain, a CD16 intracellular domain, a 4-1BB domain, a 2A cleavage site, and an mIL-15 domain as described herein. In several embodiments, this receptor complex is encoded by a nucleic acid molecule comprising a sequence obtained from a combination of sequences disclosed herein, or comprises an amino acid sequence obtained from a combination of sequences disclosed herein. In several embodiments, the encoding nucleic acid sequence, or the amino acid sequence, comprises a sequence in accordance with one or more SEQ ID NOS as described herein, such as those included herein as examples of constituent parts. In several embodiments, the encoding nucleic acid sequence, or the amino acid sequence, comprises a sequence that shares at least about 90%, at least about 94%, at least about 95%, at least about 96%, at least about 97%, at least about 98%, or at least about 99%, sequence identity, homology and/or functional equivalence with a sequence resulting from the combination one or more SEQ ID NOS as described herein. It shall be appreciated that certain sequence variability, extensions, and/or truncations of the disclosed sequences may result when combining sequences, as a result of, for example, ease or efficiency in cloning (e.g., for creation of a restriction site).

[0506] In several embodiments, there is provided a polynucleotide encoding a Tumor Binder/NKG2D Extracellular Domain/CD8hinge-CD8TM/OX40/CD3zeta chimeric antigen receptor complex (see FIG. 5, Bi-spec CAR/ACRa). The polynucleotide comprises or is composed of a Tumor Binder, an NKG2D extracellular domain (either full length or a fragment), a CD8a hinge, a CD8a transmembrane domain, an OX40 domain, and a CD3zeta domain as described herein. In several embodiments, this receptor complex is encoded by a nucleic acid molecule comprising a sequence obtained from a combination of sequences disclosed herein, or comprises an amino acid sequence obtained from a combination of sequences disclosed herein. In several embodiments, the encoding nucleic acid sequence, or the amino acid sequence, comprises a sequence in accordance with one or more SEQ ID NOS as described herein, such as those included herein as examples of constituent parts. In several embodiments, the encoding nucleic acid sequence, or the amino acid sequence, comprises a sequence that shares at least about 90%, at least about 94%, at least about 95%, at least about 96%, at least about 97%, at least about 98%, or at least about 99%, sequence identity, homology and/or functional equivalence with a sequence resulting from the combination one or more SEQ ID NOS as described herein. It shall be appreciated that certain sequence variability, extensions, and/or truncations of the disclosed sequences may result when combining sequences, as a result of, for example, ease or efficiency in cloning (e.g., for creation of a restriction site).

[0507] In several embodiments, there is provided a polynucleotide encoding a Tumor Binder/NKG2D EC Domain/CD8hinge-CD8TM/OX40/CD3zeta/2A/mIL-15 chimeric antigen receptor complex (see FIG. 5, Bi-spec CAR/ACRb). The polynucleotide comprises or is composed of a Tumor Binder, an NKG2D extracellular domain (either full length or a fragment), a CD8a hinge, a CD8a transmembrane domain, an OX40 domain, a CD3zeta domain, a 2A cleavage site, and an mIL-15 domain as described herein. In several embodiments, this receptor complex is encoded by a nucleic acid molecule comprising a sequence obtained from a combination of sequences disclosed herein, or comprises an amino acid sequence obtained from a combination of sequences disclosed herein. In several embodiments, the encoding nucleic acid sequence, or the amino acid sequence, comprises a sequence in accordance with one or more SEQ ID NOS as described herein, such as those included herein as examples of constituent parts. In several embodiments, the encoding nucleic acid sequence, or the amino acid sequence, comprises a sequence that shares at least about 90%, at least about 94%, at least about 95%, at least about 96%, at least about 97%, at least about 98%, or at least about 99%, sequence identity, homology and/or functional equivalence with a sequence resulting from the combination one or more SEQ ID NOS as described herein. It shall be appreciated that certain sequence variability, extensions, and/or truncations of the disclosed sequences may result when combining sequences, as a result of, for example, ease or efficiency in cloning (e.g., for creation of a restriction site).

[0508] In several embodiments, there is provided a polynucleotide encoding a Tumor Binder/CD8hinge/CD8TM/4-1BB/CD3zeta chimeric antigen receptor complex (see FIG. 1, CAR1a). The polynucleotide comprises or is composed of a Tumor Binder, a CD8a hinge, a CD8a transmembrane domain, a 4-1BB domain, and a CD3zeta domain. By way of non-limiting embodiment, there is provided herein an anti-CD19/CD8hinge/CD8TM/4-1BB/CD3zeta chimeric antigen receptor complex. In several embodiments, this receptor complex is encoded by a nucleic acid molecule having the sequence of SEQ ID NO: 85. In several embodiments, a nucleic acid sequence encoding an CAR1a chimeric antigen receptor comprises a sequence that shares at least about 90%, at least about 94%, at least about 95%, at least about 96%, at least about 97%, at least about 98%, or at least about 99%, sequence identity, homology and/or functional equivalence with SEQ ID NO: 85. In several embodiments, the chimeric receptor comprises the amino acid sequence of SEQ ID NO: 86. In several embodiments, a CAR1a chimeric antigen receptor comprises an amino acid sequence that shares at least about 90%, at least about 94%, at least about 95%, at least about 96%, at least about 97%, at least about 98%, or at least about 99%, sequence identity, homology and/or functional equivalence with SEQ ID NO: 86. It shall be appreciated that certain sequence variability, extensions, and/or truncations of the disclosed sequences may result when combining sequences, as a result of, for example, ease or efficiency in cloning (e.g., for creation of a restriction site). In several embodiments, there is provided an CAR1a construct that further comprises mbIL15, as disclosed herein (see e.g., FIG. 1 CAR1b).

[0509] In several embodiments, there is provided a polynucleotide encoding a Tumor Binder/CD8hinge/CD8TM/OX40/CD3zeta chimeric antigen receptor complex (see FIG. 1, CAR1c). The polynucleotide comprises or is composed of a Tumor Binder, a CD8a hinge, a CD8a transmembrane domain, an OX40 domain, and a CD3zeta domain. In several embodiments, the chimeric antigen receptor further comprises mbIL15 (see FIG. 1, CAR1d). By way of non-limiting embodiment, there is provided herein an anti CD19/CD8hinge/CD8TM/OX40/CD3zeta/2A/mIL-15 chimeric antigen receptor. In such embodiments, the polynucleotide comprises or is composed of an anti-CD19 scFv, a CD8a hinge, a CD8a transmembrane domain, an OX40 domain, a CD3zeta domain, a 2A cleavage site, and an mbIL-15 domain as described herein. In several embodiments, this receptor complex is encoded by a nucleic acid molecule having the sequence of SEQ ID NO: 59. In several embodiments, a nucleic acid sequence encoding an CAR1d chimeric antigen receptor comprises a sequence that shares at least about 90%, at least about 94%, at least about 95%, at least about 96%, at least about 97%, at least about 98%, or at least about 99%, sequence identity, homology and/or functional equivalence with SEQ ID NO: 59. In several embodiments, the chimeric receptor comprises the amino acid sequence of SEQ ID NO: 60. In several embodiments, a NK19 chimeric antigen receptor comprises an amino acid sequence that shares at least about 90%, at least about 94%, at least about 95%, at least about 96%, at least about 97%, at least about 98%, or at least about 99%, sequence identity, homology and/or functional equivalence with SEQ ID NO: 60. In several embodiments, the CD19 scFv does not comprise a Flag tag. It shall be appreciated that certain sequence variability, extensions, and/or truncations of the disclosed sequences may result when combining sequences, as a result of, for example, ease or efficiency in cloning (e.g., for creation of a restriction site).

[0510] In several embodiments, there is provided a polynucleotide encoding a Tumor Binder/CD8hinge/CD28TM/CD28/CD3zeta chimeric antigen receptor complex (see FIG. 1, CAR1e). The polynucleotide comprises or is composed of a Tumor Binder, a CD8a hinge, a CD28 transmembrane domain, CD28 signaling domain, and a CD3zeta domain. In several embodiments, the chimeric antigen receptor further comprises mbIL15 (see FIG. 1, CAR1d). By way of non-limiting embodiment, there is provided herein an anti-CD19moiety/CD8hinge/CD28TM/CD28/CD3zeta/2A/mIL15 chimeric antigen receptor complex. In such embodiments, the polynucleotide comprises or is composed of an anti-CD19 scFv, a CD8a hinge, a CD28 transmembrane domain, CD28 signaling domain, a CD3zeta domain a 2A cleavage site, and an mbIL-15 domain as described herein. In several embodiments, this receptor complex is encoded by a nucleic acid molecule having the sequence of SEQ ID NO: 61. In several embodiments, a nucleic acid sequence encoding an CAR1d chimeric antigen receptor comprises a sequence that shares at least about 90%, at least about 94%, at least about 95%, at least about 96%, at least about 97%, at least about 98%, or at least about 99%, sequence identity, homology and/or functional equivalence with SEQ ID NO: 61. In several embodiments, the chimeric receptor comprises the amino acid sequence of SEQ ID NO: 62. In several embodiments, a CAR1d chimeric antigen receptor comprises an amino acid sequence that shares at least about 90%, at least about 94%, at least about 95%, at least about 96%, at least about 97%, at least about 98%, or at least about 99%, sequence identity, homology and/or functional equivalence with SEQ ID NO: 62. In several embodiments, the CD19 scFv does not comprise a Flag tag. It shall be appreciated that certain sequence variability, extensions, and/or truncations of the disclosed sequences may result when combining sequences, as a result of, for example, ease or efficiency in cloning (e.g., for creation of a restriction site).

[0511] In several embodiments, there is provided a polynucleotide encoding a Tumor Binder/CD8hinge/CD8aTM/ICOS/CD3zeta chimeric antigen receptor complex (see FIG. 1, CAR1g). The polynucleotide comprises or is composed of a Tumor Binder, a CD8a hinge, a CD8a transmembrane domain, inducible costimulator (ICOS) signaling domain, and a CD3zeta domain. In several embodiments, the chimeric antigen receptor further comprises mbIL15 (see 1, CAR1h). By way of non-limiting embodiment, there is provided herein an anti-CD19moiety/CD8hinge/CD8aTM/ICOS/CD3zeta/2A/mIL15 chimeric antigen receptor complex. In such embodiments, the polynucleotide comprises or is composed of an anti-CD19 scFv, a CD8a hinge, a CD8a transmembrane domain, inducible costimulator (ICOS) signaling domain, a CD3zeta domain, a 2A cleavage site, and an mbIL-15 domain as described herein. In several embodiments, this receptor complex is encoded by a nucleic acid molecule having the sequence of SEQ ID NO: 63. In several embodiments, a nucleic acid sequence encoding an CAR1h chimeric antigen receptor comprises a sequence that shares at least about 90%, at least about 94%, at least about 95%, at least about 96%, at least about 97%, at least about 98%, or at least about 99%, sequence identity, homology and/or functional equivalence with SEQ ID NO: 63. In several embodiments, the chimeric receptor comprises the amino acid sequence of SEQ ID NO: 64. In several embodiments, a CAR1h chimeric antigen receptor comprises an amino acid sequence that shares at least about 90%, at least about 94%, at least about 95%, at least about 96%, at least about 97%, at least about 98%, or at least about 99%, sequence identity, homology and/or functional equivalence with SEQ ID NO: 64. In several embodiments, the CAR1h scFv does not comprise a Flag tag. It shall be appreciated that certain sequence variability, extensions, and/or truncations of the disclosed sequences may result when combining sequences, as a result of, for example, ease or efficiency in cloning (e.g., for creation of a restriction site).

[0512] In several embodiments, there is provided a polynucleotide encoding a Tumor Binder/CD8hinge/CD8aTM/CD28/4-1BB/CD3zeta chimeric antigen receptor complex (see FIG. 1, CAR1i). The polynucleotide comprises or is composed of a Tumor Binder, a CD8a hinge, a CD8a transmembrane domain, a CD28 signaling domain, a 4-1BB signaling domain, and a CD3zeta domain. In several embodiments, the chimeric antigen receptor further comprises mbIL15 (see FIG. 3A, NK19-4b). By way of non-limiting embodiment, there is provided herein an anti-CD19moiety/CD8hinge/CD8aTM/CD28/4-1BB/CD3zeta/2A/mIL-15. In such embodiments, the polynucleotide comprises or is composed of an anti-CD19 scFv, a CD8a hinge, a CD8a transmembrane domain, a CD28 signaling domain, a 4-1BB signaling domain, a CD3zeta domain, a 2A cleavage site, and an mbIL-15 domain as described herein. In several embodiments, this receptor complex is encoded by a nucleic acid molecule having the sequence of SEQ ID NO: 65. In several embodiments, a nucleic acid sequence encoding an CAR1h chimeric antigen receptor comprises a sequence that shares at least about 90%, at least about 94%, at least about 95%, at least about 96%, at least about 97%, at least about 98%, or at least about 99%, sequence identity, homology and/or functional equivalence with SEQ ID NO: 65. In several embodiments, the chimeric receptor comprises the amino acid sequence of SEQ ID NO: 66. In several embodiments, a CAR1h chimeric antigen receptor comprises an amino acid sequence that shares at least about 90%, at least about 94%, at least about 95%, at least about 96%, at least about 97%, at least about 98%, or at least about 99%, sequence identity, homology and/or functional equivalence with SEQ ID NO: 66. In several embodiments, the CAR1h scFv does not comprise a Flag tag. It shall be appreciated that certain sequence variability, extensions, and/or truncations of the disclosed sequences may result when combining sequences, as a result of, for example, ease or efficiency in cloning (e.g., for creation of a restriction site).

[0513] In several embodiments, there is provided a polynucleotide encoding a Tumor Binder/CD8hinge/NKG2DTM/OX40/CD3zeta chimeric antigen receptor complex (see FIG. 2, CAR2a). The polynucleotide comprises or is composed of a Tumor Binder, a CD8a hinge, a NKG2D transmembrane domain, an OX40 signaling domain, and a CD3zeta domain. In several embodiments, the chimeric antigen receptor further comprises mbIL15 (see FIG. 2, CAR2b). By way of non-limiting embodiment, there is provided herein an anti-CD19moiety/CD8hinge/NKG2DTM/OX40/CD3zeta/2A/mIL-15 chimeric antigen receptor complex. In such embodiments, the polynucleotide comprises or is composed of an anti-CD19 scFv, a CD8a hinge, a NKG2D transmembrane domain, an OX40 signaling domain, a CD3zeta domain, a 2A cleavage site, and an mbIL-15 domain as described herein. In several embodiments, this receptor complex is encoded by a nucleic acid molecule having the sequence of SEQ ID NO: 67. In several embodiments, a nucleic acid sequence encoding an CAR2b chimeric antigen receptor comprises a sequence that shares at least about 90%, at least about 94%, at least about 95%, at least about 96%, at least about 97%, at least about 98%, or at least about 99%, sequence identity, homology and/or functional equivalence with SEQ ID NO: 67. In several embodiments, the chimeric receptor comprises the amino acid sequence of SEQ ID NO: 68. In several embodiments, a CAR2b chimeric antigen receptor comprises an amino acid sequence that shares at least about 90%, at least about 94%, at least about 95%, at least about 96%, at least about 97%, at least about 98%, or at least about 99%, sequence identity, homology and/or functional equivalence with SEQ ID NO: 68. In several embodiments, the CD19 scFv does not comprise a Flag tag. It shall be appreciated that certain sequence variability, extensions, and/or truncations of the disclosed sequences may result when combining sequences, as a result of, for example, ease or efficiency in cloning (e.g., for creation of a restriction site).

[0514] In several embodiments, there is provided a polynucleotide encoding a Tumor Binder/CD8hinge/CD8aTM/CD40/CD3zeta chimeric antigen receptor complex (see Figure CAR2c). The polynucleotide comprises or is composed of Tumor Binder, a CD8a hinge, a CD8a transmembrane domain, a CD40 signaling domain, and a CD3zeta domain. In several embodiments, the chimeric antigen receptor further comprises mbIL15 (see FIG. 1, CAR2d). By way of non-limiting embodiment, there is provided herein an anti-CD19moiety/CD8hinge/CD8aTM/CD40/CD3zeta/2A/mIL-15 chimeric antigen receptor complex. In such embodiments, the polynucleotide comprises or is composed of an anti-CD19 scFv variable heavy chain, a CD8a hinge, a CD8a transmembrane domain, a CD40 signaling domain, a CD3zeta domain, a 2A cleavage site, and an mbIL-15 domain as described herein. In several embodiments, this receptor complex is encoded by a nucleic acid molecule having the sequence of SEQ ID NO: 69. In several embodiments, a nucleic acid sequence encoding an CAR2d chimeric antigen receptor comprises a sequence that shares at least about 90%, at least about 94%, at least about 95%, at least about 96%, at least about 97%, at least about 98%, or at least about 99%, sequence identity, homology and/or functional equivalence with SEQ ID NO: 69. In several embodiments, the chimeric receptor comprises the amino acid sequence of SEQ ID NO: 70. In several embodiments, a CAR2d chimeric antigen receptor comprises an amino acid sequence that shares at least about 90%, at least about 94%, at least about 95%, at least about 96%, at least about 97%, at least about 98%, or at least about 99%, sequence identity, homology and/or functional equivalence with SEQ ID NO: 70. In several embodiments, the CD19 scFv does not comprise a Flag tag. It shall be appreciated that certain sequence variability, extensions, and/or truncations of the disclosed sequences may result when combining sequences, as a result of, for example, ease or efficiency in cloning (e.g., for creation of a restriction site).

[0515] In several embodiments, there is provided a polynucleotide encoding a Tumor Binder/CD8hinge/CD8aTM/OX40/CD3zeta/2A/EGFRt chimeric antigen receptor complex (see FIG. 2, CAR2e). The polynucleotide comprises or is composed of a Tumor Binder, a CD8a hinge, a CD8a transmembrane domain, an OX40 signaling domain, a CD3zeta domain, a 2A cleavage side, and a truncated version of the epidermal growth factor receptor (EGFRt). In several embodiments, the chimeric antigen receptor further comprises mbIL15 (see FIG. 2, CAR2f). By way of non-limiting embodiment, there is provided herein an anti-CD19moiety/CD8hinge/CD8aTM/OX40/CD3zeta/2A/mIL-15/2A/EGFRt chimeric antigen receptor complex. In such embodiments, the polynucleotide comprises or is composed of an anti-CD19 scFv, a CD8a hinge, a CD8a transmembrane domain, an OX40 signaling domain, a CD3zeta domain, a 2A cleavage side, a truncated version of the epidermal growth factor receptor (EGFRt), an additional 2A cleavage site, and an mbIL-15 domain as described herein. In several embodiments, this receptor complex is encoded by a nucleic acid molecule having the sequence of SEQ ID NO: 71. In several embodiments, a nucleic acid sequence encoding an CAR2f chimeric antigen receptor comprises a sequence that shares at least about 90%, at least about 94%, at least about 95%, at least about 96%, at least about 97%, at least about 98%, or at least about 99%, sequence identity, homology and/or functional equivalence with SEQ ID NO: 71. In several embodiments, the chimeric receptor comprises the amino acid sequence of SEQ ID NO: 72. In several embodiments, a CAR2f chimeric antigen receptor comprises an amino acid sequence that shares at least about 90%, at least about 94%, at least about 95%, at least about 96%, at least about 97%, at least about 98%, or at least about 99%, sequence identity, homology and/or functional equivalence with SEQ ID NO: 72. In several embodiments, the CD19 scFv does not comprise a Flag tag. It shall be appreciated that certain sequence variability, extensions, and/or truncations of the disclosed sequences may result when combining sequences, as a result of, for example, ease or efficiency in cloning (e.g., for creation of a restriction site).

[0516] In several embodiments, there is provided a polynucleotide encoding a Tumor Binder/CD8hinge/CD8aTM/CD40/CD3zeta chimeric antigen receptor complex (see FIG. 2, CAR2g). The polynucleotide comprises or is composed of a Tumor Binder, a CD8a hinge, a CD8a transmembrane domain, a CD40 signaling domain, and a CD3zeta domain. In several embodiments, the chimeric antigen receptor further comprises mbIL15 (see FIG. 2, CAR2h). By way of non-limiting embodiment, there is provided herein an anti-CD19moiety/CD8hinge/CD8aTM/CD40/CD3zeta/2A/mIL-15 chimeric antigen receptor complex. In such embodiments, the polynucleotide comprises or is composed of an anti-CD19 scFv variable light chain, a CD8a hinge, a CD8a transmembrane domain, a CD40 signaling domain, a CD3zeta domain, a 2A cleavage site, and an mbIL-15 domain as described herein. In several embodiments, this receptor complex is encoded by a nucleic acid molecule having the sequence of SEQ ID NO: 73. In several embodiments, a nucleic acid sequence encoding an CAR2h chimeric antigen receptor comprises a sequence that shares at least about 90%, at least about 94%, at least about 95%, at least about 96%, at least about 97%, at least about 98%, or at least about 99%, sequence identity, homology and/or functional equivalence with SEQ ID NO: 73. In several embodiments, the chimeric receptor comprises the amino acid sequence of SEQ ID NO: 74. In several embodiments, a CAR2h chimeric antigen receptor comprises an amino acid sequence that shares at least about 90%, at least about 94%, at least about 95%, at least about 96%, at least about 97%, at least about 98%, or at least about 99%, sequence identity, homology and/or functional equivalence with SEQ ID NO: 74. In several embodiments, the CD19 scFv does not comprise a Flag tag. It shall be appreciated that certain sequence variability, extensions, and/or truncations of the disclosed sequences may result when combining sequences, as a result of, for example, ease or efficiency in cloning (e.g., for creation of a restriction site).

[0517] In several embodiments, there is provided a polynucleotide encoding a Tumor Binder/CD8hinge/CD8aTM/CD27/CD3zeta chimeric antigen receptor complex (see FIG. 3, CAR3a). The polynucleotide comprises or is composed of a Tumor Binder, a CD8α hinge, a CD8α transmembrane domain, a CD27 signaling domain, and a CD3zeta domain. In several embodiments, the chimeric antigen receptor further comprises mbIL15 (see FIG. 3, CAR3b). By way of non-limiting embodiment, there is provided herein an anti-CD19moiety/CD8hinge/CD8aTM/CD27/CD3zeta/2A/mIL-15 chimeric antigen receptor complex. In such embodiments, the polynucleotide comprises or is composed of an anti-CD19 scFv, a CD8a hinge, a CD8a transmembrane domain, a CD27 signaling domain, a CD3zeta domain, a 2A cleavage site, and an mbIL-15 domain as described herein. In several embodiments, this receptor complex is encoded by a nucleic acid molecule having the sequence of SEQ ID NO: 75. In several embodiments, a nucleic acid sequence encoding an CAR3b chimeric antigen receptor comprises a sequence that shares at least about 90%, at least about 94%, at least about 95%, at least about 96%, at least about 97%, at least about 98%, or at least about 99%, sequence identity, homology and/or functional equivalence with SEQ ID NO: 75. In several embodiments, the chimeric receptor comprises the amino acid sequence of SEQ ID NO: 76. In several embodiments, a CAR3b chimeric antigen receptor comprises an amino acid sequence that shares at least about 90%, at least about 94%, at least about 95%, at least about 96%, at least about 97%, at least about 98%, or at least about 99%, sequence identity, homology and/or functional equivalence with SEQ ID NO: 76. In several embodiments, the CD19 scFv does not comprise a Flag tag. It shall be appreciated that certain sequence variability, extensions, and/or truncations of the disclosed sequences may result when combining sequences, as a result of, for example, ease or efficiency in cloning (e.g., for creation of a restriction site).

[0518] In several embodiments, there is provided a polynucleotide encoding a Tumor Binder/CD8hinge/CD8aTM/CD70/CD3zeta chimeric antigen receptor complex (see FIG. 3, CAR3c). The polynucleotide comprises or is composed of a Tumor Binder, a CD8a hinge, a CD8a transmembrane domain, a CD70 signaling domain, and a CD3zeta domain. In several embodiments, the chimeric antigen receptor further comprises mbIL15 (see FIG. 3, CAR3d). By way of non-limiting embodiment, there is provided herein an anti-CD19moiety/CD8hinge/CD8aTM/CD70/CD3zeta/2A/mIL-15 chimeric antigen receptor complex. In such embodiments, the polynucleotide comprises or is composed of an anti-CD19 scFv, a CD8a hinge, a CD8a transmembrane domain, a CD70 signaling domain, a CD3zeta domain, a 2A cleavage site, and an mbIL-15 domain as described herein. In several embodiments, this receptor complex is encoded by a nucleic acid molecule having the sequence of SEQ ID NO: 77. In several embodiments, a nucleic acid sequence encoding an CAR3d chimeric antigen receptor comprises a sequence that shares at least about 90%, at least about 94%, at least about 95%, at least about 96%, at least about 97%, at least about 98%, or at least about 99%, sequence identity, homology and/or functional equivalence with SEQ ID NO: 77. In several embodiments, the chimeric receptor comprises the amino acid sequence of SEQ ID NO: 78. In several embodiments, a CAR3d chimeric antigen receptor comprises an amino acid sequence that shares at least about 90%, at least about 94%, at least about 95%, at least about 96%, at least about 97%, at least about 98%, or at least about 99%, sequence identity, homology and/or functional equivalence with SEQ ID NO: 78. In several embodiments, the CD19 scFv does not comprise a Flag tag. It shall be appreciated that certain sequence variability, extensions, and/or truncations of the disclosed sequences may result when combining sequences, as a result of, for example, ease or efficiency in cloning (e.g., for creation of a restriction site).

[0519] In several embodiments, there is provided a polynucleotide encoding a Tumor Binder/CD8hinge/CD8aTM/CD161/CD3zeta chimeric antigen receptor complex (see FIG. 3, CAR3e). The polynucleotide comprises or is composed of a Tumor Binder, a CD8a hinge, a CD8a transmembrane domain, a CD161 signaling domain, and a CD3zeta domain. In several embodiments, the chimeric antigen receptor further comprises mbIL15 (see FIG. 3, CAR3f). By way of non-limiting embodiment, there is provided herein an anti-CD19moiety/CD8hinge/CD8aTM/CD161/CD3zeta/2A/mIL-15 chimeric antigen receptor complex. In such embodiments, the polynucleotide comprises or is composed of an anti-CD19 scFv, a CD8a hinge, a CD8a transmembrane domain, a CD161 signaling domain, a CD3zeta domain, a 2A cleavage site, and an mbIL-15 domain as described herein. In several embodiments, this receptor complex is encoded by a nucleic acid molecule having the sequence of SEQ ID NO: 79. In several embodiments, a nucleic acid sequence encoding an CAR3f chimeric antigen receptor comprises a sequence that shares at least about 90%, at least about 94%, at least about 95%, at least about 96%, at least about 97%, at least about 98%, or at least about 99%, sequence identity, homology and/or functional equivalence with SEQ ID NO: 79. In several embodiments, the chimeric receptor comprises the amino acid sequence of SEQ ID NO: 80. In several embodiments, a CAR3f chimeric antigen receptor comprises an amino acid sequence that shares at least about 90%, at least about 94%, at least about 95%, at least about 96%, at least about 97%, at least about 98%, or at least about 99%, sequence identity, homology and/or functional equivalence with SEQ ID NO: 80. In several embodiments, the CD19 scFv does not comprise a Flag tag. It shall be appreciated that certain sequence variability, extensions, and/or truncations of the disclosed sequences may result when combining sequences, as a result of, for example, ease or efficiency in cloning (e.g., for creation of a restriction site).

[0520] In several embodiments, there is provided a polynucleotide encoding a Tumor Binder/CD8hinge/CD8aTM/CD40L/CD3zeta chimeric antigen receptor complex (see FIG. 3, CAR3g). The polynucleotide comprises or is composed of a Tumor Binder, a CD8a hinge, a CD8a transmembrane domain, a CD40L signaling domain, and a CD3zeta domain. In several embodiments, the chimeric antigen receptor further comprises mbIL15 (see FIG. 3, CAR3h). By way of non-limiting embodiment, there is provided herein an anti-CD19moiety/CD8hinge/CD8aTM/CD40L/CD3zeta/2A/mIL-15 chimeric antigen receptor complex. In such embodiments, the polynucleotide comprises or is composed of an anti-CD19 scFv, a CD8a hinge, a CD8a transmembrane domain, a CD40L signaling domain, a CD3zeta domain, a 2A cleavage site, and an mbIL-15 domain as described herein. In several embodiments, this receptor complex is encoded by a nucleic acid molecule having the sequence of SEQ ID NO: 81. In several embodiments, a nucleic acid sequence encoding an CAR3h chimeric antigen receptor comprises a sequence that shares at least about 90%, at least about 94%, at least about 95%, at least about 96%, at least about 97%, at least about 98%, or at least about 99%, sequence identity, homology and/or functional equivalence with SEQ ID NO: 81. In several embodiments, the chimeric receptor comprises the amino acid sequence of SEQ ID NO: 82. In several embodiments, a CAR3h chimeric antigen receptor comprises an amino acid sequence that shares at least about 90%, at least about 94%, at least about 95%, at least about 96%, at least about 97%, at least about 98%, or at least about 99%, sequence identity, homology and/or functional equivalence with SEQ ID NO: 82. In several embodiments, the CD19 scFv does not comprise a Flag tag. It shall be appreciated that certain sequence variability, extensions, and/or truncations of the disclosed sequences may result when combining sequences, as a result of, for example, ease or efficiency in cloning (e.g., for creation of a restriction site).

[0521] In several embodiments, there is provided a polynucleotide encoding a Tumor Binder/CD8hinge/CD8aTM/CD44/CD3zeta chimeric antigen receptor complex (see FIG. 3, CAR3i). The polynucleotide comprises or is composed of a Tumor Binder, a CD8a hinge, a CD8a transmembrane domain, a CD44 signaling domain, and a CD3zeta domain. In several embodiments, the chimeric antigen receptor further comprises mbIL15 (see FIG. 3, CAR3j). By way of non-limiting embodiment, there is provided herein an anti-CD19moiety/CD8hinge/CD8aTM/CD44/CD3zeta/2A/mIL-15 chimeric antigen receptor complex. In such embodiments, the polynucleotide comprises or is composed of an anti-CD19 scFv, a CD8a hinge, a CD8a transmembrane domain, a CD44 signaling domain, a CD3zeta domain, a 2A cleavage site, and an mbIL-15 domain as described herein. In several embodiments, this receptor complex is encoded by a nucleic acid molecule having the sequence of SEQ ID NO: 83. In several embodiments, a nucleic acid sequence encoding an CAR3j chimeric antigen receptor comprises a sequence that shares at least about 90%, at least about 94%, at least about 95%, at least about 96%, at least about 97%, at least about 98%, or at least about 99%, sequence identity, homology and/or functional equivalence with SEQ ID NO: 83. In several embodiments, the chimeric receptor comprises the amino acid sequence of SEQ ID NO: 84. In several embodiments, a CAR3j chimeric antigen receptor comprises an amino acid sequence that shares at least about 90%, at least about 94%, at least about 95%, at least about 96%, at least about 97%, at least about 98%, or at least about 99%, sequence identity, homology and/or functional equivalence with SEQ ID NO: 84. In several embodiments, the CD19 scFv does not comprise a Flag tag. It shall be appreciated that certain sequence variability, extensions, and/or truncations of the disclosed sequences may result when combining sequences, as a result of, for example, ease or efficiency in cloning (e.g., for creation of a restriction site).

[0522] In several embodiments, there is provided a polynucleotide encoding an anti CD123/CD8a hinge/CD8a transmembrane domain/OX40/CD3zeta chimeric antigen receptor complex (see FIG. 6, CD123 CARa). The polynucleotide comprises or is composed of an anti CD123 moiety, a CD8alpha hinge, a CD8a transmembrane domain, an OX40 domain, and a CD3zeta domain as described herein. In several embodiments, this receptor complex is encoded by a nucleic acid molecule comprising a sequence obtained from a combination of sequences disclosed herein, or comprises an amino acid sequence obtained from a combination of sequences disclosed herein. In several embodiments, the encoding nucleic acid sequence, or the amino acid sequence, comprises a sequence in accordance with one or more SEQ ID NOS as described herein, such as those included herein as examples of constituent parts. In several embodiments, the encoding nucleic acid sequence, or the amino acid sequence, comprises a sequence that shares at least about 90%, at least about 94%, at least about 95%, at least about 96%, at least about 97%, at least about 98%, or at least about 99%, sequence identity, homology and/or functional equivalence with a sequence resulting from the combination one or more SEQ ID NOS as described herein. It shall be appreciated that certain sequence variability, extensions, and/or truncations of the disclosed sequences may result when combining sequences, as a result of, for example, ease or efficiency in cloning (e.g., for creation of a restriction site). In several embodiments, there is provided an CD123 CAR construct that further comprises mbIL15, as disclosed herein (see e.g., FIG. 6, CD123 CARb).

[0523] In several embodiments, there is provided a polynucleotide encoding an anti CLDN6/CD8a hinge/CD8a transmembrane domain/OX40/CD3zeta chimeric antigen receptor complex (see FIG. 6, CLDN6 CARa). The polynucleotide comprises or is composed of an anti CLDN6 binding moiety, a CD8alpha hinge, a CD8a transmembrane domain, an OX40 domain, and a CD3zeta domain as described herein. In several embodiments, this receptor complex is encoded by a nucleic acid molecule comprising a sequence obtained from a combination of sequences disclosed herein, or comprises an amino acid sequence obtained from a combination of sequences disclosed herein. In several embodiments, the encoding nucleic acid sequence, or the amino acid sequence, comprises a sequence in accordance with one or more SEQ ID NOS as described herein, such as those included herein as examples of constituent parts. In several embodiments, the encoding nucleic acid sequence, or the amino acid sequence, comprises a sequence that shares at least about 90%, at least about 94%, at least about 95%, at least about 96%, at least about 97%, at least about 98%, or at least about 99%, sequence identity, homology and/or functional equivalence with a sequence resulting from the combination one or more SEQ ID NOS as described herein. It shall be appreciated that certain sequence variability, extensions, and/or truncations of the disclosed sequences may result when combining sequences, as a result of, for example, ease or efficiency in cloning (e.g., for creation of a restriction site). In several embodiments, there is provided a CLDN6 CAR construct that further comprises mbIL15, as disclosed herein (see e.g., FIG. 6, CLDN6 CARb).

[0524] Depending on the embodiment, various binders can be used to target CLDN6. In several embodiments, peptide binders are used, while in some embodiments antibodies, or fragments thereof are used. In several embodiments employing antibodies, antibody sequences are optimized, humanized or otherwise manipulated or mutated from their native form in order to increase one or more of stability, affinity, avidity or other characteristic of the antibody or fragment. In several embodiments, an antibody is provided that is specific for CLDN6. In several embodiments, an scFv is provided that is specific for CLDN6. In several embodiments, the antibody or scFv specific for CLDN6 comprises a heavy chain variable comprising the amino acid sequence of SEQ ID NO. 88. In some embodiments, the heavy chain variable comprises a sequence of amino acids that is at least 70%, 75%, 80%, 85%, 90%, 91%, 92%, 93%, 94%, 95%, 96%, 97%, 98%, 99%, or more, identical to the sequence of SEQ ID NO. 88. In some embodiments, the heavy chain variable comprises a sequence of amino acids that is encoded by a polynucleotide that hybridizes under moderately stringent conditions to the complement of a polynucleotide that encodes a heavy chain variable of SEQ ID NO. 88. In some embodiments, the heavy chain variable domain a sequence of amino acids that is encoded by a polynucleotide that hybridizes under stringent conditions to the complement of a polynucleotide that encodes a heavy chain variable encodes a heavy chain variable of SEQ ID NO. 88.

[0525] In several embodiments, the antibody or scFv specific for CLDN6 comprises a light chain variable comprising the amino acid sequence of any of SEQ ID NO. 89, 90, or 91. In several embodiments, the light chain variable comprises a sequence of amino acids that is encoded by a nucleotide sequence that is at least 70%, 75%, 80%, 85%, 90%, 91%, 92%, 93%, 94%, 95%, 96%, 97%, 98%, 99%, or more, identical to the identical to the sequence of SEQ ID NO. 89, 90, or 91. In some embodiments, the light chain variable comprises a sequence of amino acids that is encoded by a polynucleotide that hybridizes under moderately stringent conditions to the complement of a polynucleotide that encodes a light chain variable of SEQ ID NO. 89, 90, or 91. In some embodiments, the light chain variable domain comprises a sequence of amino acids that is encoded by a polynucleotide that hybridizes under stringent conditions to the complement of a polynucleotide that encodes a light chain variable domain of SEQ ID NO. 89, 90, or 91.

[0526] In several embodiments, the anti-CLDN6 antibody or scFv comprises one, two, or three heavy chain complementarity determining region (CDR) and one, two, or three light chain CDRs. In several embodiments, a first heavy chain CDR has the amino acid sequence of SEQ ID NO: 92. In some embodiments, the first heavy chain CDR comprises a sequence of amino acids that is at least 70%, 75%, 80%, 85%, 90%, 91%, 92%, 93%, 94%, 95%, 96%, 97%, 98%, 99%, or more, identical to the sequence of SEQ ID NO. 92. In several embodiments, a second heavy chain CDR has the amino acid sequence of SEQ ID NO: 93. In some embodiments, the second heavy chain CDR comprises a sequence of amino acids that is at least 70%, 75%, 80%, 85%, 90%, 91%, 92%, 93%, 94%, 95%, 96%, 97%, 98%, 99%, or more, identical to the sequence of SEQ ID NO. 93. In several embodiments, a third heavy chain CDR has the amino acid sequence of SEQ ID NO: 94. In some embodiments, the third heavy chain CDR comprises a sequence of amino acids that is at least 70%, 75%, 80%, 85%, 90%, 91%, 92%, 93%, 94%, 95%, 96%, 97%, 98%, 99%, or more, identical to the sequence of SEQ ID NO. 94.

[0527] In several embodiments, a first light chain CDR has the amino acid sequence of SEQ ID NO: 95, 98, or 101. In some embodiments, the first light chain CDR comprises a sequence of amino acids that is at least 70%, 75%, 80%, 85%, 90%, 91%, 92%, 93%, 94%, 95%, 96%, 97%, 98%, 99%, or more, identical to the sequence of SEQ ID NO. 95, 98, or 101. In several embodiments, a second light chain CDR has the amino acid sequence of SEQ ID NO: 96, 99, or 102. In some embodiments, the second light chain CDR comprises a sequence of amino acids that is at least 70%, 75%, 80%, 85%, 90%, 91%, 92%, 93%, 94%, 95%, 96%, 97%, 98%, 99%, or more, identical to the sequence of SEQ ID NO. 96, 99, or 102. In several embodiments, a third light chain CDR has the amino acid sequence of SEQ ID NO: 97, 100, or 103. In some embodiments, the third light chain CDR comprises a sequence of amino acids that is at least 70%, 75%, 80%, 85%, 90%, 91%, 92%, 93%, 94%, 95%, 96%, 97%, 98%, 99%, or more, identical to the sequence of SEQ ID NO. 97, 100, or 103.

[0528] Advantageously, in several embodiments, the CLDN6 CARs are highly specific to CLDN6 and do not substantially bind to any of CLDN3, 4, or 9.

[0529] In several embodiments, there is provided a polynucleotide encoding an anti BCMA/CD8a hinge/CD8a transmembrane domain/OX40/CD3zeta chimeric antigen receptor complex (see FIG. 6, BCMA CARa). The polynucleotide comprises or is composed of an anti BCMA binding moiety, a CD8alpha hinge, a CD8a transmembrane domain, an OX40 domain, and a CD3zeta domain as described herein. In several embodiments, this receptor complex is encoded by a nucleic acid molecule comprising a sequence obtained from a combination of sequences disclosed herein, or comprises an amino acid sequence obtained from a combination of sequences disclosed herein. In several embodiments, the encoding nucleic acid sequence, or the amino acid sequence, comprises a sequence in accordance with one or more SEQ ID NOS as described herein, such as those included herein as examples of constituent parts. In several embodiments, the encoding nucleic acid sequence, or the amino acid sequence, comprises a sequence that shares at least about 90%, at least about 94%, at least about 95%, at least about 96%, at least about 97%, at least about 98%, or at least about 99%, sequence identity, homology and/or functional equivalence with a sequence resulting from the combination one or more SEQ ID NOS as described herein. It shall be appreciated that certain sequence variability, extensions, and/or truncations of the disclosed sequences may result when combining sequences, as a result of, for example, ease or efficiency in cloning (e.g., for creation of a restriction site). In several embodiments, there is provided a BCMA CAR construct that further comprises mbIL15, as disclosed herein (see e.g., FIG. 6, BCMA CARb). Additional information about anti-BCMA CARs for use in the presently disclosed methods and compositions can be found in U.S. Provisional Patent Application No. 62/960,285, which is incorporated in its entirety by reference herein.

[0530] In several embodiments, there is provided a polynucleotide encoding an anti HER2/CD8a hinge/CD8a transmembrane domain/OX40/CD3zeta chimeric antigen receptor complex (see FIG. 6, HER2 CARa). The polynucleotide comprises or is composed of an anti HER2 binding moiety, a CD8alpha hinge, a CD8a transmembrane domain, an OX40 domain, and a CD3zeta domain as described herein. In several embodiments, this receptor complex is encoded by a nucleic acid molecule comprising a sequence obtained from a combination of sequences disclosed herein, or comprises an amino acid sequence obtained from a combination of sequences disclosed herein. In several embodiments, the encoding nucleic acid sequence, or the amino acid sequence, comprises a sequence in accordance with one or more SEQ ID NOS as described herein, such as those included herein as examples of constituent parts. In several embodiments, the encoding nucleic acid sequence, or the amino acid sequence, comprises a sequence that shares at least about 90%, at least about 94%, at least about 95%, at least about 96%, at least about 97%, at least about 98%, or at least about 99%, sequence identity, homology and/or functional equivalence with a sequence resulting from the combination one or more SEQ ID NOS as described herein. It shall be appreciated that certain sequence variability, extensions, and/or truncations of the disclosed sequences may result when combining sequences, as a result of, for example, ease or efficiency in cloning (e.g., for creation of a restriction site). In several embodiments, there is provided a HER2 CAR construct that further comprises mbIL15, as disclosed herein (see e.g., FIG. 6, HER2 CARb).

[0531] In several embodiments, there is provided a polynucleotide encoding an NKG2D/CD8a hinge/CD8a transmembrane domain/OX40/CD3zeta activating chimeric receptor complex (see FIG. 6, NKG2D ACRa). The polynucleotide comprises or is composed of a fragment of the NKG2D receptor capable of binding a ligand of the NKG2D receptor, a CD8alpha hinge, a CD8α transmembrane domain, an OX40 domain, and a CD3zeta domain as described herein. In several embodiments, this receptor complex is encoded by a nucleic acid molecule comprising the nucleic acid sequence of SEQ ID NO: 145. In yet another embodiment, this chimeric receptor is encoded by the amino acid sequence of SEQ ID NO: 174. In some embodiments, the sequence of the chimeric receptor may vary from SEQ ID NO. 145, but remains, depending on the embodiment, at least 70%, at least 75%, at least 80%, at least 85%, at least 90%, or at least 95% homologous with SEQ ID NO. 145. In several embodiments, while the chimeric receptor may vary from SEQ ID NO. 145, the chimeric receptor retains, or in some embodiments, has enhanced, NK cell activating and/or cytotoxic function. Additionally, in several embodiments, this construct can optionally be co-expressed with mbIL15 (FIG. 7, NKG2D ACRb). Additional information about chimeric receptors for use in the presently disclosed methods and compositions can be found in PCT Patent Publication No. WO/2018/183385, which is incorporated in its entirety by reference herein.

[0532] In several embodiments, there is provided a polynucleotide encoding an anti CD70/CD8a hinge/CD8a transmembrane domain/OX40/CD3zeta chimeric antigen receptor complex (see FIG. 7, CD70 CARa). The polynucleotide comprises or is composed of an anti CD70 binding moiety, a CD8alpha hinge, a CD8a transmembrane domain, an OX40 domain, and a CD3zeta domain as described herein. In several embodiments, this receptor complex is encoded by a nucleic acid molecule comprising a sequence obtained from a combination of sequences disclosed herein, or comprises an amino acid sequence obtained from a combination of sequences disclosed herein. In several embodiments, the encoding nucleic acid sequence, or the amino acid sequence, comprises a sequence in accordance with one or more SEQ ID NOS as described herein, such as those included herein as examples of constituent parts. In several embodiments, the encoding nucleic acid sequence, or the amino acid sequence, comprises a sequence that shares at least about 90%, at least about 94%, at least about 95%, at least about 96%, at least about 97%, at least about 98%, or at least about 99%, sequence identity, homology and/or functional equivalence with a sequence resulting from the combination one or more SEQ ID NOS as described herein. It shall be appreciated that certain sequence variability, extensions, and/or truncations of the disclosed sequences may result when combining sequences, as a result of, for example, ease or efficiency in cloning (e.g., for creation of a restriction site). In several embodiments, there is provided a CD70 CAR construct that further comprises mbIL15, as disclosed herein (see e.g., FIG. 7, CD70 CARb). Additional information about anti-CD70 CAR for use in the presently disclosed methods and compositions can be found in U.S. Provisional Patent Application Nos. 63/038,645 and 63/090,041, which are each incorporated in their entirety by reference herein.

[0533] In several embodiments, there is provided a polynucleotide encoding an anti mesothelin/CD8a hinge/CD8a transmembrane domain/OX40/CD3zeta chimeric antigen receptor complex (see FIG. 7, Mesothelin CARa). The polynucleotide comprises or is composed of an anti mesothelin binding moiety, a CD8alpha hinge, a CD8a transmembrane domain, an OX40 domain, and a CD3zeta domain as described herein. In several embodiments, this receptor complex is encoded by a nucleic acid molecule comprising a sequence obtained from a combination of sequences disclosed herein, or comprises an amino acid sequence obtained from a combination of sequences disclosed herein. In several embodiments, the encoding nucleic acid sequence, or the amino acid sequence, comprises a sequence in accordance with one or more SEQ ID NOS as described herein, such as those included herein as examples of constituent parts. In several embodiments, the encoding nucleic acid sequence, or the amino acid sequence, comprises a sequence that shares at least about 90%, at least about 94%, at least about 95%, at least about 96%, at least about 97%, at least about 98%, or at least about 99%, sequence identity, homology and/or functional equivalence with a sequence resulting from the combination one or more SEQ ID NOS as described herein. It shall be appreciated that certain sequence variability, extensions, and/or truncations of the disclosed sequences may result when combining sequences, as a result of, for example, ease or efficiency in cloning (e.g., for creation of a restriction site). In several embodiments, there is provided a Mesothelin CAR construct that further comprises mbIL15, as disclosed herein (see e.g., FIG. 7, Mesothelin CARb).

[0534] In several embodiments, there is provided a polynucleotide encoding an anti PD-L1/CD8a hinge/CD8a transmembrane domain/OX40/CD3zeta chimeric antigen receptor complex (see FIG. 7, PD-L1 CARa). The polynucleotide comprises or is composed of an anti PD-L1 binding moiety, a CD8alpha hinge, a CD8a transmembrane domain, an OX40 domain, and a CD3zeta domain as described herein. In several embodiments, this receptor complex is encoded by a nucleic acid molecule comprising a sequence obtained from a combination of sequences disclosed herein, or comprises an amino acid sequence obtained from a combination of sequences disclosed herein. In several embodiments, the encoding nucleic acid sequence, or the amino acid sequence, comprises a sequence in accordance with one or more SEQ ID NOS as described herein, such as those included herein as examples of constituent parts. In several embodiments, the encoding nucleic acid sequence, or the amino acid sequence, comprises a sequence that shares at least about 90%, at least about 94%, at least about 95%, at least about 96%, at least about 97%, at least about 98%, or at least about 99%, sequence identity, homology and/or functional equivalence with a sequence resulting from the combination one or more SEQ ID NOS as described herein. It shall be appreciated that certain sequence variability, extensions, and/or truncations of the disclosed sequences may result when combining sequences, as a result of, for example, ease or efficiency in cloning (e.g., for creation of a restriction site). In several embodiments, there is provided a PD-L1 CAR construct that further comprises mbIL15, as disclosed herein (see e.g., FIG. 7, PD-L1 CARb).

[0535] In several embodiments, there is provided a polynucleotide encoding an anti EGFR/CD8a hinge/CD8a transmembrane domain/OX40/CD3zeta chimeric antigen receptor complex (see FIG. 7, EGFR CARa). The polynucleotide comprises or is composed of an anti EGFR binding moiety, a CD8alpha hinge, a CD8a transmembrane domain, an OX40 domain, and a CD3zeta domain as described herein. In several embodiments, this receptor complex is encoded by a nucleic acid molecule comprising a sequence obtained from a combination of sequences disclosed herein, or comprises an amino acid sequence obtained from a combination of sequences disclosed herein. In several embodiments, the encoding nucleic acid sequence, or the amino acid sequence, comprises a sequence in accordance with one or more SEQ ID NOS as described herein, such as those included herein as examples of constituent parts. In several embodiments, the encoding nucleic acid sequence, or the amino acid sequence, comprises a sequence that shares at least about 90%, at least about 94%, at least about 95%, at least about 96%, at least about 97%, at least about 98%, or at least about 99%, sequence identity, homology and/or functional equivalence with a sequence resulting from the combination one or more SEQ ID NOS as described herein. It shall be appreciated that certain sequence variability, extensions, and/or truncations of the disclosed sequences may result when combining sequences, as a result of, for example, ease or efficiency in cloning (e.g., for creation of a restriction site). In several embodiments, there is provided a EGFR CAR construct that further comprises mbIL15, as disclosed herein (see e.g., FIG. 7, EGFR CARb).

[0536] In several embodiments, an expression vector, such as a MSCV-IRES-GFP plasmid, a non-limiting example of which is provided in SEQ ID NO: 87, is used to express any of the chimeric antigen receptors provided for herein.

### Methods of Treatment

[0537] Provided herein are methods of treatment, e.g., comprising administering any of the engineered immune cells described herein or a composition containing engineered immune cells. In some aspects, also provided are methods of administering any of the engineered immune cells described herein or a composition containing engineered immune cells to a subject (e.g., a subject having a disease or disorder). In some aspects, there is also provided a use of any of the engineered immune cells described herein or a composition containing the engineered immune cells for treating a disease or disorder. In some aspects, there is also provided a use of any of the engineered immune cells described herein or a composition containing the engineered immune cells for the manufacture of a medicament to treat a disease or disorder. In some aspects, also provided is any of the engineered immune cells described herein or a composition containing the engineered immune cells for use in treating a disease or disorder, or for administration to a subject having a disease or disorder.

[0538] Diseases and disorders include tumors, including solid tumors, hematologic malignancies, and melanoma, and include local and metastatic tumors; infectious diseases, such as infection by a virus or other pathogen, e.g., HIV, HCV, HBV, CMV, HPV and parasitic diseases; and autoimmune and inflammatory diseases. In some embodiments, the disease or disorder is a tumor, cancer, malignancy, neoplasm, or other proliferative disease or disorder. In some embodiments, the disease or disorder is an infectious disease or disorder, such as, but not limited to, viral, retroviral, bacterial and protozoal infections, immunodeficiency, Cytomegalovirus (CMV), epstein-barr virus (EBV), adenovirus, BK polyoma virus. In some embodiments, the disease or disorder is an autoimmune or inflammatory disease or disorder, such as arthritis (e.g., Rheumatoid Arthritis (RA)), type I diabetes, Systemic Lupus Erythematosus (SLE), inflammatory bowel disease, psoriasis, scleroderma, autoimmune thyroid disease, Graces' disease, Crohn's disease, multiple sclerosis, asthma, and/or a disease or disorder associated with transplantation.

[0539] In some embodiments, the disease or disorder is cancer. Some embodiments relate to a method of treating, ameliorating, inhibiting, or preventing cancer with a cell or immune cell comprising a chimeric antigen receptor and/or an activating chimeric receptor, as disclosed herein. In some embodiments, the method includes treating or preventing cancer. In some embodiments, the method includes administering a therapeutically effective amount of immune cells expressing a tumor-directed chimeric antigen receptor and/or tumor-directed chimeric receptor as described herein. Examples of types of cancer that may be treated as such are described herein.

[0540] In certain embodiments, treatment of a subject with a genetically engineered cell(s) described herein achieves one, two, three, four, or more of the following effects, including, for example: (i) reduction or amelioration the severity of disease or symptom associated therewith; (ii) reduction in the duration of a symptom associated with a disease; (iii) protection against the progression of a disease or symptom associated therewith; (iv) regression of a disease or symptom associated therewith; (v) protection against the development or onset of a symptom associated with a disease; (vi) protection against the recurrence of a symptom associated with a disease; (vii) reduction in the hospitalization of a subject; (viii) reduction in the hospitalization length; (ix) an increase in the survival of a subject with a disease; (x) a reduction in the number of symptoms associated with a disease; (xi) an enhancement, improvement, supplementation, complementation, or augmentation of the prophylactic or therapeutic effect(s) of another therapy. Advantageously, the non-alloreactive engineered T cells disclosed herein further enhance one or more of the above. Administration can be by a variety of routes, including, without limitation, intravenous, intra-arterial, subcutaneous, intramuscular, intrahepatic, intraperitoneal and/or local delivery to an affected tissue.

### Cancer Types

[0541] Some embodiments of the compositions and methods described herein relate to administering immune cells comprising a tumor-directed chimeric antigen receptor and/or tumor-directed chimeric receptor to a subject with cancer. Various embodiments provided for herein include treatment or prevention of the following non-limiting examples of cancers. Examples of cancer include, but are not limited to, acute lymphoblastic leukemia (ALL), acute myeloid leukemia (AML), adrenocortical carcinoma, Kaposi sarcoma, lymphoma, gastrointestinal cancer, appendix cancer, central nervous system cancer, basal cell carcinoma, bile duct cancer, bladder cancer, bone cancer, brain tumors (including but not limited to astrocytomas, spinal cord tumors, brain stem glioma, craniopharyngioma, ependymoblastoma, ependymoma, medulloblastoma, medulloepithelioma), breast cancer, bronchial tumors, Burkitt lymphoma, cervical cancer, colon cancer, chronic lymphocytic leukemia (CLL), chronic myelogenous leukemia (CML), chronic myeloproliferative disorders, ductal carcinoma, endometrial cancer, esophageal cancer, gastric cancer, Hodgkin lymphoma, non-Hodgkin lymphoma, hairy cell leukemia, renal cell cancer, leukemia, oral cancer, nasopharyngeal cancer, liver cancer, lung cancer (including but not limited to, non-small cell lung cancer, (NSCLC) and small cell lung cancer), pancreatic cancer, bowel cancer, lymphoma, melanoma, ocular cancer, ovarian cancer, pancreatic cancer, prostate cancer, pituitary cancer, uterine cancer, and vaginal cancer.

[0542] In some embodiments, the cancer comprises a tumor. In some embodiments, the cancer comprises a solid tumor. In some embodiments, the cancer is a hematologic malignancy.

[0543] In some embodiments, the cancer is multiple myeloma. In some embodiments, the cancer is a leukemia or a lymphoma. In some embodiments, the cancer is a leukemia. In some embodiments, the leukemia is ALL, AML, CLL, or CML. In some embodiments, the cancer is a lymphoma. In some embodiments, the lymphoma is Hodgkin lymphoma or non-Hodgkin lymphoma (NHL). In some embodiments, the cancer is NHL. In some embodiments, the NHL is large B-cell lymphoma (LBCL). In some embodiments, the NHL is aggressive NHL. In some embodiments the NHL is a diffuse large B-cell lymphoma (DLBCL), Burkitt lymphoma, follicular lymphoma (FL, including grade 1, 2, 3a, and 3b), small lymphocytic lymphoma (SLL), mantle cell lymphoma, or marginal zone lymphoma. In some embodiments, the NHL is DLBCL. In some embodiments, the NHL is FL. In some embodiments, the NHL is mantle cell lymphoma. In some embodiments, the NHL is marginal zone lymphoma.

[0544] In some embodiments, the cancer is relapsed/refractory. In some embodiments, the cancer is relapsed refractory to a prior line of therapy. In some embodiments, the prior line of therapy comprises one prior line of therapy. In some embodiments, the prior line of therapy comprises two prior lines of therapy. In some embodiments, the prior line of therapy comprises three prior lines of therapy.

### Cancer Targets

[0545] The disease or disorder to be treated can be any disease or condition in which expression of an antigen is associated with and/or involved in the etiology of the disease or disorder, e.g., causing, exacerbating or otherwise participating in such disease or disorder. Non-limiting examples of diseases and disorders can include diseases or disorders associated with malignancies or cellular transformation (e.g., cancer), autoimmune or inflammatory diseases or infectious diseases caused by, for example, bacteria, viruses, or other pathogens. Additionally, non-limiting examples of antigens are described herein, including antigens associated with various diseases and disorder that can be treated. In particular embodiments, the chimeric receptor specifically binds to an antigen associated with the disease or disorder.

[0546] Some embodiments of the compositions and methods described herein relate to immune cells comprising a chimeric receptor that targets a cancer antigen. Non-limiting examples of target antigens include: CD19; TNF receptor family member B cell maturation (BCMA); CD38; DLL3; G protein coupled receptor class C group 5, member D (GPRC5D); epidermal growth factor receptor (EGFR) CD138; prostate-specific membrane antigen (PSMA); Fms Like Tyrosine Kinase 3 (FLT3); KREMEN2 (Kringle Containing Transmembrane Protein 2); ALPPL2 (Alkaline phosphatase, placental-like 2); CLDN4 (Claudin 4); CLDN6 (Claudin 6); CD123; CD22; CD30; CD171; CS1 (also referred to as CD2 subset 1, CRACC, SLAMF7, CD319, and 19A24); CD5, C-type lectin-like molecule-1 (CLL-1 or CLECL1); CD33; epidermal growth factor receptor variant III (EGFRviii); ganglioside G2 (GD2); ganglioside GD3 (aNeu5Ac(2-8)aNeu5Ac(2-3)bDGalp(1-4)bDGlcp(1-1)Cer); Tn antigen ((Tn Ag) or (GalNAca-Ser/Thr)); Receptor tyrosine kinase-like orphan receptor 1 (ROR1); Tumor-associated glycoprotein 72 (TAG72); CD44v6; a glycosylated CD43 epitope expressed on acute leukemia or lymphoma but not on hematopoietic progenitors, a glycosylated CD43 epitope expressed on non-hematopoietic cancers, Carcinoembryonic antigen (CEA); Epithelial cell adhesion molecule (EPCAM); B7H3 (CD276); KIT (CD117); Interleukin-13 receptor subunit alpha-2 (IL-13Ra2 or CD213A2); Mesothelin; Interleukin 11 receptor alpha (IL-11Ra); prostate stem cell antigen (PSCA); Protease Serine 21 (Testisin or PRSS21); vascular endothelial growth factor receptor 2 (VEGFR2); Lewis(Y) antigen; CD24; Platelet-derived growth factor receptor beta (PDGFR-beta); Stage-specific embryonic antigen-4 (SSEA-4); CD20; Folate receptor alpha (FRa or FR1); Folate receptor beta (FRb); Receptor tyrosine-protein kinase ERBB2 (Her2/neu); Mucin 1, cell surface associated (MUC1); epidermal growth factor receptor (EGFR); neural cell adhesion molecule (NCAM); Prostase; prostatic acid phosphatase (PAP); elongation factor 2 mutated (ELF2M); Ephrin B2; fibroblast activation protein alpha (FAP); insulin-like growth factor 1 receptor (IGF-I receptor), carbonic anhydrase IX (CAIX); Proteasome (Prosome, Macropain) Subunit, Beta Type, 9 (LMP2); glycoprotein 100 (gp1OO); oncogene fusion protein consisting of breakpoint cluster region (BCR) and Abelson murine leukemia viral oncogene homolog 1 (Abl) (bcr-abl); tyrosinase; ephrin type-A receptor 2 (EphA2); sialyl Lewis adhesion molecule (sLe); ganglioside GM3 (aNeu5Ac(2-3)bDClalp(1-4)bDGlcp(1-1)Cer); transglutaminase 5 (TGS5); high molecular weight-melanoma associated antigen (HMWMAA); o-acetyl-GD2 ganglioside (OAcGD2); tumor endothelial marker 1 (TEM1/CD248); tumor endothelial marker 7-related (TEM7R); claudin 6 (CLDN6); thyroid stimulating hormone receptor (TSHR); chromosome X open reading frame 61 (CXORF61); CD97; CD179a; anaplastic lymphoma kinase (ALK); Polysialic acid; placenta-specific 1 (PLAC1); hexasaccharide portion of globoH glycoceramide (GloboH); mammary gland differentiation antigen (NY-BR-1); uroplakin 2 (UPK2); Hepatitis A virus cellular receptor 1 (HAVCR1); adrenoceptor beta 3 (ADRB3); pannexin 3 (PANX3); G protein-coupled receptor 20 (GPR20); lymphocyte antigen 6 complex, locus K 9 (LY6K); Olfactory receptor 51E2 (OR51E2); TCR Gamma Alternate Reading Frame Protein (TARP); Wilms tumor protein (WT1); Cancer/testis antigen 1 (NY-ESO-1); Cancer/testis antigen 2 (LAGE-1a); Melanoma-associated antigen 1 (MAGE-A1); ETS translocation-variant gene 6, located on chromosome 12p (ETV6-AML); sperm protein 17 (SPA17); X Antigen Family, Member 1A (XAGE1); angiopoietin-binding cell surface receptor 2 (Tie 2); melanoma cancer testis antigen-1 (MAD-CT-1); melanoma cancer testis antigen-2 (MAD-CT-2); Fos-related antigen 1; tumor protein p53 (p53); p53 mutant; prostein; survivin; telomerase; prostate carcinoma tumor antigen-1 (PCT A-1 or Galectin 8), melanoma antigen recognized by T cells 1 (MelanA or MARTI); Rat sarcoma (Ras) mutant; human Telomerase; reverse transcriptase (hTERT); sarcoma translocation breakpoints; melanoma inhibitor of apoptosis (ML-IAP); ERG (transmembrane protease, serine 2 (TMPRSS2) ETS fusion gene); N-Acetyl glucosaminyl-transferase V (NA17); paired box protein Pax-3 (PAX3); Androgen receptor; Cyclin B1; v-myc avian myelocytomatosis viral oncogene neuroblastoma derived homolog (MYCN); Ras Homolog Family Member C (RhoC); Tyrosinase-related protein 2 (TRP-2); Cytochrome P450 IB 1 (CYPIB 1); CCCTC-Binding Factor (Zinc Finger Protein)-Like (BORIS or Brother of the Regulator of Imprinted Sites), Squamous Cell Carcinoma Antigen Recognized By T Cells 3 (SART3); Paired box protein Pax-5 (PAX5); proacrosin binding protein sp32 (OY-TES1); lymphocyte-specific protein tyrosine kinase (LCK); A kinase anchor protein 4 (AKAP-4); synovial sarcoma, X breakpoint 2 (SSX2); Receptor for Advanced Gly cation Endproducts (RAGE-1); renal ubiquitous 1 (RU1); renal ubiquitous 2 (RU2); legumain; human papilloma virus E6 (HPV E6); human papilloma virus E7 (HPV E7); intestinal carboxyl esterase; heat shock protein 70-2 mutated (mut hsp70-2); CD79a; CD79b; CD72; Leukocyte-associated immunoglobulin-like receptor 1 (LAIR1); Fc fragment of IgA receptor (FCAR or CD89); Leukocyte immunoglobulin-like receptor subfamily A member 2 (LILRA2); CD300 molecule-like family member f (CD300LF); C-type lectin domain family 12 member A (CLEC12A); bone marrow stromal cell antigen 2 (BST2); EGF-like module-containing mucin-like hormone receptor-like 2 (EMR2); lymphocyte antigen 75 (LY75); Glypican-3 (GPC3); Fc receptor-like 5 (FCRL5); and immunoglobulin lambda-like polypeptide 1 (IGLL1), MPL, Biotin, c-MYC epitope Tag, CD34, LAMP1 TROP2, GFRalpha4, CDH17, CDH6, NYBR1, CDH19, CD200R, Slea (CA19.9; Sialyl Lewis Antigen); Fucosyl-GM1, PTK7, gpNMB, CDH1-CD324, CD276/B7H3, IL1 1Ra, IL13Ra2, CD179b-IGL11, TCRgamma-delta, NKG2D, CD32 (FCGR2A), Tn ag, Tim1-/HVCR1, CSF2RA (GM-CSFR-alpha), TGFbetaR2, Lews Ag, TCR-beta1 chain, TCR-beta2 chain, TCR-gamma chain, TCR-delta chain, FITC, Leutenizing hormone receptor (LHR), Follicle stimulating hormone receptor (FSHR), Gonadotropin Hormone receptor (CGHR or GR), CCR4, GD3, SLAMF6, SLAMF4, HIV1 envelope glycoprotein, HTLV1-Tax, CMV pp65, EBV-EBNA3c, KSHV K8.1, KSHV-gH, influenza A hemagglutinin (HA), GAD, PDL1, Guanylyl cyclase C (GCC), auto antibody to desmoglein 3 (Dsg3), auto antibody to desmoglein 1 (Dsg1), HLA, HLA-A, HLA-A2, HLA-B, HLA-C, HLA-DP, HLA-DM, HLA-DOA, HLA-DOB, HLA-DQ, HLA-DR, HLA-G, IgE, CD99, Ras G12V, Tissue Factor 1 (TF1), AFP, Claudin1 8.2 (CLD18A2 or CLDN18A.2)), P-glycoprotein, STEAP1, Liv1, Nectin-4, Cripto, gpA33, BST1/CD157, low conductance chloride channel, and the antigen recognized by TNT antibody. In some embodiments, the antigen is CD19. In some embodiments, the antigen is a ligand of NKG2D. In some embodiments, the antigen is CD70. In some embodiments, the antigen is BCMA.

### Administration and Dosing

[0547] Further provided herein are methods of treating a subject having cancer, comprising administering to the subject a composition comprising immune cells (such as NK and/or T cells) engineered to express a cytotoxic receptor complex as disclosed herein. For example, some embodiments of the compositions and methods described herein relate to use of a tumor-directed chimeric antigen receptor and/or tumor-directed chimeric receptor, or use of cells expressing a tumor-directed chimeric antigen receptor and/or tumor-directed chimeric receptor, for treating a cancer patient. Uses of such engineered immune cells for treating cancer are also provided.

[0548] In certain embodiments, treatment of a subject with a genetically engineered cell(s) described herein achieves one, two, three, four, or more of the following effects, including, for example: (i) reduction or amelioration the severity of disease or symptom associated therewith; (ii) reduction in the duration of a symptom associated with a disease; (iii) protection against the progression of a disease or symptom associated therewith; (iv) regression of a disease or symptom associated therewith; (v) protection against the development or onset of a symptom associated with a disease; (vi) protection against the recurrence of a symptom associated with a disease; (vii) reduction in the hospitalization of a subject; (viii) reduction in the hospitalization length; (ix) an increase in the survival of a subject with a disease; (x) a reduction in the number of symptoms associated with a disease; (xi) an enhancement, improvement, supplementation, complementation, or augmentation of the prophylactic or therapeutic effect(s) of another therapy. Each of these comparisons are versus, for example, a different therapy for a disease, which includes a cell-based immunotherapy for a disease using cells that do not express the constructs disclosed herein.

[0549] In some embodiments, the immune cells are obtained from a subject (e.g., a first subject) other than the subject that will receive or ultimately receives the cell therapy. In such embodiments, the cells are then administered to a different subject of the same species, e.g., a second subject. In some embodiments, the first and second subjects are genetically similar. In some embodiments, the second subject expresses the same HLA class or supertype as the first subject.

[0550] Advantageously, the non-alloreactive engineered T cells disclosed herein further enhance one or more of the above.

[0551] Administration can be by a variety of routes, including, without limitation, intravenous, intra-arterial, subcutaneous, intramuscular, intrahepatic, intraperitoneal, and/or local delivery to an affected tissue. In some embodiments, a given dose is administered by a single infusion of cells. In some embodiments, a given dose is administered by multiple infusions of cells, or by continuous infusion of cells. In some embodiments, administration of the cell dose or any other therapy (e.g., lymphodepletion therapy and/or combination therapy) is by outpatient delivery.

[0552] Doses of immune cells such as NK and/or T cells can be readily determined for a given subject based on their body mass, disease type and state, and desired aggressiveness of treatment, but range, depending on the embodiments, from about 10⁵ cells per kg to about 10¹² cells per kg (e.g., 10⁵-10⁷, 10⁷-10¹⁰, 10¹⁰-10¹² and overlapping ranges therein). In one embodiment, a dose escalation regimen is used. In several embodiments, a range of immune cells such as NK and/or T cells is administered, for example between about 1×10⁶ cells/kg to about 1×10⁸ cells/kg. In several embodiments, a range of NK cells is administered, for example between about 1×10⁶ cells/kg to about 1×10⁸ cells/kg. In several embodiments, a range of T cells is administered, for example between about 1×10⁶ cells/kg to about 1×10⁸ cells/kg.

[0553] In some embodiments, a dose of engineered cells comprises between about 300×10⁶ and 1.5×10⁹ NK cells. In some embodiments, a dose of engineered cells comprises about 300×10⁶ NK cells. In some embodiments, a dose of engineered cells comprises about 1×10⁹ NK cells. In some embodiments, a dose of engineered cells comprises about 1.5×10⁹ NK cells. In some embodiments, a dose of engineered cells comprises between about 300×10⁶ and 1.5×10⁹ T cells. In some embodiments, a dose of engineered cells comprises about 300×10⁶ T cells. In some embodiments, a dose of engineered cells comprises about 1×10⁹T cells. In some embodiments, a dose of engineered cells comprises about 1.5×10⁹ T cells.

[0554] In some embodiments, a dose of engineered cells comprises both NK and T cells. In some embodiments, a dose of engineered cells comprises between about 300×10⁶ and 1.5×10⁹ NK cells and between about 300×10⁶ and 1.5×10⁹ T cells. In some embodiments, a dose comprises about an equal number of NK cells and T cells. In some embodiments, a dose comprises more NK cells than T cell. In some embodiments, a dose comprises more T cells than NK cells.

[0555] Depending on the embodiment, various types of cancer can be treated. In several embodiments, hepatocellular carcinoma is treated. Additional embodiments provided for herein include treatment or prevention of the following non-limiting examples of cancers including, but not limited to, acute lymphoblastic leukemia (ALL), acute myeloid leukemia (AML), adrenocortical carcinoma, Kaposi sarcoma, lymphoma, gastrointestinal cancer, appendix cancer, central nervous system cancer, basal cell carcinoma, bile duct cancer, bladder cancer, bone cancer, brain tumors (including but not limited to astrocytomas, spinal cord tumors, brain stem glioma, glioblastoma, craniopharyngioma, ependymoblastoma, ependymoma, medulloblastoma, medulloepithelioma), breast cancer, bronchial tumors, Burkitt lymphoma, cervical cancer, colon cancer, chronic lymphocytic leukemia (CLL), chronic myelogenous leukemia (CML), chronic myeloproliferative disorders, ductal carcinoma, endometrial cancer, esophageal cancer, gastric cancer, Hodgkin lymphoma, non-Hodgkin lymphoma, hairy cell leukemia, renal cell cancer, leukemia, oral cancer, nasopharyngeal cancer, liver cancer, lung cancer (including but not limited to, non-small cell lung cancer, (NSCLC) and small cell lung cancer), pancreatic cancer, bowel cancer, lymphoma, melanoma, ocular cancer, ovarian cancer, pancreatic cancer, prostate cancer, pituitary cancer, uterine cancer, and vaginal cancer.

[0556] In some embodiments, also provided herein are nucleic acid and amino acid sequences that have sequence identity and/or homology of at least 80%, 85%, 90%, 95%, 96%, 97%, 98%, 99% (and ranges therein) as compared with the respective nucleic acid or amino acid sequences of SEQ ID NOS. 1-174 (or combinations of two or more of SEQ ID NOS: 1-174) and that also exhibit one or more of the functions as compared with the respective SEQ ID NOS. 1-174 (or combinations of two or more of SEQ ID NOS: 1-174) including but not limited to, (i) enhanced proliferation, (ii) enhanced activation, (iii) enhanced cytotoxic activity against cells presenting ligands to which NK cells harboring receptors encoded by the nucleic acid and amino acid sequences bind, (iv) enhanced homing to tumor or infected sites, (v) reduced off target cytotoxic effects, (vi) enhanced secretion of immunostimulatory cytokines and chemokines (including, but not limited to IFNg, TNFa, IL-22, CCL3, CCL4, and CCL5), (vii) enhanced ability to stimulate further innate and adaptive immune responses, and (viii) combinations thereof.

[0557] Additionally, in several embodiments, there are provided amino acid sequences that correspond to any of the nucleic acids disclosed herein, while accounting for degeneracy of the nucleic acid code. Furthermore, those sequences (whether nucleic acid or amino acid) that vary from those expressly disclosed herein, but have functional similarity or equivalency are also contemplated within the scope of the present disclosure. The foregoing includes mutants, truncations, substitutions, or other types of modifications.

[0558] In several embodiments, polynucleotides encoding the disclosed cytotoxic receptor complexes are mRNA. In some embodiments, the polynucleotide is DNA. In some embodiments, the polynucleotide is operably linked to at least one regulatory element for the expression of the cytotoxic receptor complex.

[0559] Additionally provided, according to several embodiments, is a vector comprising the polynucleotide encoding any of the polynucleotides provided for herein, wherein the polynucleotides are optionally operatively linked to at least one regulatory element for expression of a cytotoxic receptor complex. In several embodiments, the vector is a retrovirus.

[0560] Further provided herein are engineered immune cells (such as NK and/or T cells) comprising the polynucleotide, vector, or cytotoxic receptor complexes as disclosed herein. Further provided herein are compositions comprising a mixture of engineered immune cells (such as NK cells and/or engineered T cells), each population comprising the polynucleotide, vector, or cytotoxic receptor complexes as disclosed herein. Additionally, there are provided herein compositions comprising a mixture of engineered immune cells (such as NK cells and/or engineered T cells), each population comprising the polynucleotide, vector, or cytotoxic receptor complexes as disclosed herein and the T cell population having been genetically modified to reduce/eliminate GvHD and/or HvD. In some embodiments, the NK cells and the T cells are from the same donor. In some embodiments, the NK cells and the T cells are from different donors.

[0561] Doses of immune cells such as NK cells or T cells can be readily determined for a given subject based on their body mass, disease type and state, and desired aggressiveness of treatment, but range, depending on the embodiments, from about 10⁵ cells per kg to about 10¹² cells per kg (e.g., 10-10⁷, 10⁷-10¹⁰, 10¹⁰-10¹² and overlapping ranges therein). In one embodiment, a dose escalation regimen is used. In some embodiments, a dose of immune cells comprises NK cells. In some embodiments, a dose of immune cells comprises T cells. In some embodiments, a dose of immune cells comprises NK cells and T cells. In several embodiments, a range of NK cells is administered, for example between about 1×10⁶ cells/kg to about 1×10⁸ cells/kg. In several embodiments, a range of T cells is administered, for example between about 1×10⁶ cells/kg to about 1×10⁸ cells/kg. Depending on the embodiment, various types of cancer or infection disease can be treated.

[0562] For the prevention or treatment of cancer, the appropriate dosage may depend on the type of cancer to be treated, the type of cells or recombinant receptors, the severity and course of the cancer, whether the cells are administered for preventive or therapeutic purposes, previous therapy, the subject's clinical history and response to the cells, and the discretion of the attending physician. The compositions and cells are in some embodiments suitably administered to the subject at one time or over a series of treatments.

[0563] In some embodiments, the engineered immune cells are administered as part of a combination treatment, such as simultaneously with or sequentially with, in any order, another or additional therapeutic intervention, such as an antibody or engineered cell or receptor or agent, such as a cytotoxic or therapeutic agent. The engineered immune cells in some embodiments are co-administered with one or more additional therapeutic agents or in connection with another therapeutic intervention, either simultaneously or sequentially in any order. In some embodiments, the additional therapeutic agent is any interventions or agents described herein, such as any interventions or agents descried that can ameliorate symptoms of toxicity. In some contexts, the engineered immune cells are co-administered with another therapy sufficiently close in time such that the engineered immune cell populations enhance the effect of one or more additional therapeutic agents, or vice versa. In some embodiments, the engineered immune cells are administered prior to the one or more additional therapeutic agents. In some embodiments, the engineered immune cells are administered after the one or more additional therapeutic agents. In some embodiments, the one or more additional agents include a cytokine, such as IL-2, for example, to enhance persistence. In some embodiments, the methods comprise administration of a chemotherapeutic agent. In some embodiments, the methods comprise administration of a chemotherapeutic agent, e.g., a conditioning chemotherapeutic agent, for example, to reduce tumor burden prior to the administration, including as described in the subsequent section.

[0564] The dose of the additional agent can be any therapeutically effective amount, e.g. any dose amount described herein, and the appropriate dosage of the additional agent may depend on the type of disease to be treated, the type, dose and/or frequency of the binding molecule, recombinant receptor, cell and/or composition administered, the severity and course of the disease, previous therapy, the patient's clinical history and response to cell therapy, and the discretion of the attending physician.

### Lymphodepleting Therapy

[0565] Preconditioning subjects with immunodepleting (e.g., lymphodepleting) therapies in some aspects can improve the effects of an adoptive cell therapy, including any of those provided herein. Thus, in some embodiments, the methods include administering a preconditioning agent, such as a lymphodepleting or chemotherapeutic agent, such as cyclophosphamide, fludarabine, or combinations thereof, to a subject prior to administration of the engineered immune cells. For example, the subject may be administered a preconditioning agent at least 2 days prior, such as at least 3, 4, 5, 6, or 7 days prior, to administration of the engineered immune cells. In some embodiments, the subject is administered a preconditioning agent no more than 7 days prior, such as no more than 6, 5, 4, 3, or 2 days prior, to administration of the engineered immune cells.

[0566] In some embodiments, where the lymphodepleting agent comprises cyclophosphamide, the subject is administered cyclophosphamide at a dose between or between about 100 mg/m² and 500 mg/m², such as between or between about 200 mg/m² and 400 mg/m², or 250 mg/m² and 350 mg/m², inclusive. In some instances, the subject is administered about 300 mg/m² of cyclophosphamide. In some instances, the subject is administered about 500 mg/m² of cyclophosphamide. In some embodiments, the cyclophosphamide can be administered in a single dose or can be administered in a plurality of doses, such as given daily, every other day or every three days. In some embodiments, cyclophosphamide is administered daily, such as for 1-5 days, for example, for 3 to 5 days. In some instances, the subject is administered about 300 mg/m² of cyclophosphamide, daily for 3 days, prior to initiation of the cell therapy. In some instances, the subject is administered about 500 mg/m² of cyclophosphamide, daily for 3 days, prior to initiation of the cell therapy.

[0567] In some embodiments, where the lymphodepleting agent comprises fludarabine, the subject is administered fludarabine at a dose between or between about 1 mg/m² and 100 mg/m², such as between or between about 10 mg/m² and 75 mg/m², 15 mg/m² and 50 mg/m², 20 mg/m² and 40 mg/m², or 24 mg/m² and 35 mg/m², inclusive. In some instances, the subject is administered about 30 mg/m² of fludarabine. In some embodiments, the fludarabine can be administered in a single dose or can be administered in a plurality of doses, such as given daily, every other day or every three days. In some embodiments, fludarabine is administered daily, such as for 1-5 days, for example, for 3 to 5 days. In some instances, the subject is administered about 30 mg/m² of fludarabine, daily for 3 days, prior to initiation of the cell therapy.

[0568] In some embodiments, the lymphodepleting agent comprises a combination of agents, such as a combination of cyclophosphamide and fludarabine. Thus, the combination of agents may include cyclophosphamide at any dose or administration schedule, such as those described above, and fludarabine at any dose or administration schedule, such as those described above. For example, in some aspects, the subject is administered between 3-5 doses each of 300 mg/m² of cyclophosphamide and 50 mg/m² fludarabine prior to administration of the engineered immune cells. For example, in some aspects, the subject is administered between 3-5 doses each of 500 mg/m² of cyclophosphamide and 50 mg/m² fludarabine prior to administration of the engineered immune cells.

### Compositions and Formulations

[0569] In some embodiments, a cell dose comprising cells engineered with a chimeric receptor (e.g., a CAR) is provided as a composition or formulation, such as a pharmaceutical composition or formulation. Such compositions can be used in accordance with and/or with provided articles or compositions, such as for the prevention or treatment of diseases, conditions, and disorders, or in detection, diagnosis, and prognosis methods.

[0570] The term “pharmaceutical formulation” refers to a formulation in a form that allows the biological activity of the active ingredient contained therein to be effective and that is free of additional components having unacceptable toxicity to the subject to which the formulation will be applied.

[0571] By “pharmaceutically acceptable carrier” is meant an ingredient of a pharmaceutical formulation that is non-toxic to a subject, except for the active ingredient. Pharmaceutically acceptable carriers include, but are not limited to, buffers, excipients, stabilizers, or preservatives.

[0572] In some aspects, the choice of carrier depends in part on the particular cell or agent and/or the method of administration. Thus, there are a variety of suitable formulations. For example, the pharmaceutical composition may contain a preservative. Suitable preservatives may include, for example, methyl paraben, propyl paraben, sodium benzoate and benzalkonium chloride. In some aspects, a mixture of two or more preservatives is used. Preservatives or mixtures thereof are typically present in amounts of about 0.0001% to about 2% by weight of the total composition Pharmaceutically acceptable carriers are generally non-toxic to recipients at the dosages and concentrations used, and include, but are not limited to: buffers such as phosphate, citrate and other organic acids; antioxidants, including ascorbic acid and methionine; preservatives (such as octadecyl dimethyl benzyl ammonium chloride; hexamethonium chloride; benzalkonium chloride; benzethonium chloride; phenol, butanol or benzyl alcohol; alkyl parabens, such as methyl or propyl paraben, catechol; resorcinol; cyclohexanol; 3-pentanol; and m-cresol); low molecular weight (less than about 10 residues) polypeptides; proteins, such as serum albumin, gelatin or immunoglobulins; hydrophilic polymers such as polyvinylpyrrolidone; amino acids such as glycine, glutamine, asparagine, histidine, arginine or lysine; monosaccharides, disaccharides, and other carbohydrates including glucose, mannose, or dextrins; chelating agents, such as EDTA; sugars such as sucrose, mannitol, trehalose or sorbitol; salt-forming counterions, such as sodium; metal complexes (e.g., zinc-protein complexes); and/or a non-ionic surfactant, such as polyethylene glycol (PEG).

[0573] In some aspects, a buffer is included in the composition. Suitable buffering agents include, for example, citric acid, sodium citrate, phosphoric acid, potassium phosphate, and various other acids and salts. In some aspects, a mixture of two or more buffers is used. The buffering agent or mixtures thereof are typically present in an amount of from about 0.001% to about 4% by weight of the total composition. Methods for preparing administrable pharmaceutical compositions are known.

[0574] The formulation or composition may also contain more than one active ingredient that may be used for a particular indication, disease or condition that is prevented or treated with the cell or agent, where the respective activities do not adversely affect each other. Such active ingredients are present in combination in an amount effective for the intended purpose in a suitable manner. Thus, in some embodiments, the pharmaceutical composition further comprises other pharmaceutically active agents or drugs, such as chemotherapeutic agents, e.g., asparaginase, busulfan, carboplatin, cisplatin, daunomycin, doxorubicin, fluorouracil, gemcitabine, hydroxyurea, methotrexate, paclitaxel, rituximab, vinblastine, vincristine, and the like. In some embodiments, the agent or cell is administered in the form of a salt (e.g., a pharmaceutically acceptable salt). Suitable pharmaceutically acceptable acid addition salts include those derived from inorganic acids (such as hydrochloric, hydrobromic, phosphoric, metaphosphoric, nitric and sulfuric) and organic acids (such as tartaric, acetic, citric, malic, lactic, fumaric, benzoic, glycolic, gluconic, succinic and arylsulfonic, e.g., p-toluenesulfonic acid).

[0575] In some embodiments, the pharmaceutical composition contains the agent or cell in an amount effective to treat or prevent the disease or disorder (e.g., a therapeutically effective amount or a prophylactically effective amount). In some embodiments, treatment or prevention efficacy is monitored by periodic assessment of the treated subject. For repeated administrations over several days or longer, depending on the condition, the treatment is repeated until the desired suppression of disease symptoms occurs. However, other dosage regimens may be useful and may be determined. The desired dose may be delivered by administering the composition as a single bolus, by administering the composition as multiple boluses, or by administering the composition as a continuous infusion.

[0576] Formulations include those for oral, intravenous, intraperitoneal, subcutaneous, pulmonary, transdermal, intramuscular, intranasal, buccal, sublingual, or suppository administration. In some embodiments, the agent or cell population is administered to the subject by intravenous, intraperitoneal, or subcutaneous injection using peripheral systemic delivery.

[0577] In some embodiments, the compositions are provided as sterile liquid formulations (e.g., isotonic aqueous solutions, suspensions, emulsions, dispersions, or viscous compositions), which in some aspects may be buffered to a selected pH. Liquid formulations are generally easier to prepare than gels, other viscous compositions, and solid compositions. In addition, liquid compositions are somewhat more convenient to administer, particularly by injection. The liquid composition can comprise a carrier, which can be a solvent or dispersion medium containing, for example, water, saline, phosphate buffered saline, polyols (e.g., glycerol, propylene glycol, liquid polyethylene glycol), and suitable mixtures thereof.

[0578] Sterile injectable solutions can be prepared by incorporating the agent or cell into a solvent, such as an admixture with a suitable carrier, diluent, or excipient (e.g., sterile water, saline, glucose, dextrose, and the like).

[0579] Formulations for in vivo administration are typically sterile. Sterility can be readily achieved, for example, by filtration through sterile filtration membranes. In some embodiments, the dose of engineered cells administered is in a cryopreserved composition. In some aspects, the composition is administered after thawing the cryopreserved composition.

### Articles and Kits

[0580] Also provided are articles of manufacture, systems, devices, and kits for performing the provided methods. Also provided are articles of manufacture comprising (i) any of the compositions described herein; and (ii) instructions for administering the composition to a subject.

[0581] In some embodiments, an article of manufacture or kit comprises one or more containers (typically a plurality of containers), packaging material, and a label or package insert located on or associated with the one or more containers and/or packages, the label or package insert typically comprising instructions for performing any of the methods provided herein, e.g., for administering engineered immune cells to a subject. In some embodiments, the instructions provide guidance or assignment methods for assessing whether a subject is likely or suspected to be likely to respond prior to receiving the engineered immune and/or the extent or level of response after administration of the engineered immune cells. In some aspects, the article of manufacture may contain a dose or composition of engineered immune cells.

[0582] The articles provided herein contain packaging materials. Packaging materials for packaging provided materials are well known to those skilled in the art. Examples of packaging materials include, but are not limited to, blister packs, bottles, tubes, inhalers, pumps, bags, vials, containers, syringes, disposable laboratory items (e.g., pipette tips and/or plastic sheets), or bottles. The article or kit may include means to facilitate dispensing of materials or to facilitate use in a high throughput or large scale manner, for example to facilitate use in a robotic device. Typically, the package does not react with the composition contained therein.

[0583] In some embodiments, the reagents and/or cell compositions are packaged separately. In some embodiments, each vessel may have a single compartment. In some embodiments, the other components of the article of manufacture or kit are packaged separately, or together in a single compartment. For example, in some embodiments, engineered NK cells are provided separately from engineered T cells.

### Definitions

[0584] The terms “polypeptide” and “protein” are used interchangeably to refer to a polymer of amino acid residues, and are not limited to a minimum length. Polypeptides, including the provided receptors and other polypeptides, e.g., linkers or peptides, may include amino acid residues including natural and/or non-natural amino acid residues. The terms also include post-expression modifications of the polypeptide, for example, glycosylation, sialylation, acetylation, and phosphorylation. In some aspects, the polypeptides may contain modifications with respect to a native or natural sequence, as long as the protein maintains the desired activity. These modifications may be deliberate, as through site-directed mutagenesis, or may be accidental, such as through mutations of hosts which produce the proteins or errors due to PCR amplification.

[0585] As used herein, a “subject” is a mammal, such as a human or other animal, and typically is human. In some embodiments, the subject, e.g., patient, to whom the agent or agents, cells, cell populations, or compositions are administered, is a mammal, typically a primate, such as a human. In some embodiments, the primate is a monkey or an ape. The subject can be male or female and can be any suitable age, including infant, juvenile, adolescent, adult, and geriatric subjects. In some embodiments, the subject is a non-primate mammal, such as a rodent.

[0586] As used herein, “treatment” (and grammatical variations thereof such as “treat” or “treating”) refers to complete or partial amelioration or reduction of a disease or condition or disorder, or a symptom, adverse effect or outcome, or phenotype associated therewith. Desirable effects of treatment include, but are not limited to, alleviation of symptoms, diminishment of any direct or indirect pathological consequences of the disease, preventing metastasis, decreasing the rate of disease progression, amelioration or palliation of the disease state, and remission or improved prognosis. The terms do not imply complete curing of a disease or complete elimination of any symptom or effect(s) on all symptoms or outcomes.

[0587] “Preventing” (and grammatical variations thereof such as “prevent” or “prevention”) as used herein, includes providing prophylaxis with respect to the occurrence or recurrence of a disease in a subject that may be predisposed to the disease but has not yet been diagnosed with the disease. In some embodiments, the provided cells and compositions are used to delay development of a disease or to slow the progression of a disease.

[0588] A “therapeutically effective amount” of an agent, e.g., a pharmaceutical formulation or cells, refers to an amount effective, at dosages and for periods of time necessary, to achieve a desired therapeutic result, such as for treatment of a disease, condition, or disorder, and/or pharmacokinetic or pharmacodynamic effect of the treatment. The therapeutically effective amount may vary according to factors such as the disease state, age, sex, and weight of the subject, and the populations of cells administered. In some embodiments, the provided methods involve administering the cells and/or compositions at effective amounts, e.g., therapeutically effective amounts.

[0589] The term “about” as used herein refers to the usual error range for the respective value readily known to the skilled person in this technical field. Reference to “about” a value or parameter herein includes (and describes) embodiments that are directed to that value or parameter per se.

[0590] As used herein, the singular forms “a,” “an,” and “the” include plural referents unless the context clearly dictates otherwise. For example, “a” or “an” means “at least one” or “one or more.”

[0591] Throughout this disclosure, various aspects of the claimed subject matter are presented in a range format. It should be understood that the description in range format is merely for convenience and brevity and should not be construed as an inflexible limitation on the scope of the claimed subject matter. Accordingly, the description of a range should be considered to have specifically disclosed all the possible sub-ranges as well as individual numerical values within that range. Language such as “up to,” “at least,” “greater than,” “less than,” “between,” and the like includes the number recited. Numbers preceded by a term such as “about” or “approximately” include the recited numbers. For example, where a range of values is provided, it is understood that each intervening value, between the upper and lower limit of that range and any other stated or intervening value in that stated range is encompassed within the claimed subject matter. The upper and lower limits of these smaller ranges may independently be included in the smaller ranges, and are also encompassed within the claimed subject matter, subject to any specifically excluded limit in the stated range. Where the stated range includes one or both of the limits, ranges excluding either or both of those included limits are also included in the claimed subject matter. This applies regardless of the breadth of the range.

[0592] In addition, when a sequence is disclosed as “comprising” a nucleotide or amino acid sequence, such a reference shall also include, unless otherwise indicated, that the sequence “comprises”, “consists of” or “consists essentially of” the recited sequence.

[0593] As used herein, a composition refers to any mixture of two or more products, substances, or compounds, including cells. It may be a solution, a suspension, liquid, powder, a paste, aqueous, non-aqueous or any combination thereof.

[0594] Unless defined otherwise, all terms of art, notations and other technical and scientific terms or terminology used herein are intended to have the same meaning as is commonly understood to which the claimed subject matter pertains. In some cases, terms with commonly understood meanings are defined herein for clarity and/or for ready reference, and the inclusion of such definitions herein should not necessarily be construed to represent a substantial difference over what is generally understood.

[0595] All publications, including patent documents, scientific articles and databases, referred to in this application are incorporated by reference in their entirety for all purposes to the same extent as if each individual publication were individually incorporated by reference. If a definition set forth herein is contrary to or otherwise inconsistent with a definition set forth in the patents, applications, published applications and other publications that are herein incorporated by reference, the definition set forth herein prevails over the definition that is incorporated herein by reference.

[0596] The section headings used herein are for organizational purposes only and are not to be construed as limiting the subject matter described.

### Non-Limiting Embodiments

[0597] 1. A population of genetically engineered immune cells for cancer immunotherapy, comprising:
[0598] genetically engineered immune cells that express a cytotoxic receptor comprising an extracellular ligand binding domain, a transmembrane domain, and a cytotoxic signaling complex,
[0599] wherein the immune cells are genetically edited at one or more target sites in the genome of the immune cell to yield reduced levels of expression of a protein which is encoded by a gene which comprises an edited target site as compared to a non-edited immune cell,
[0600] wherein the edits are made using a Crispr/Cas system,
[0601] wherein the edits result in a decrease in the frequency of cell surface expression of major histocompatibility complex class I (MHC I) molecules within the population of genetically engineered immune cells, and
[0602] wherein the genetically engineered immune cells are further engineered to express at least one immunosuppressive effector,
[0603] wherein the at least one immunosuppressive effector exerts suppressive effects on the cytotoxic activity of natural killer cells and/or T cells, and
[0604] wherein the genetically engineered and edited immune cells exhibit one or more of enhanced expansion capability, enhanced cytotoxicity against target cells, and enhanced persistence, as compared to cells that do not comprise said immunosuppressive effector and said edited gene.

[0605] 2. A population of genetically engineered immune cells for cancer immunotherapy, comprising:
[0606] one or more of genetically engineered NK cells and genetically engineered T cells;
[0607] wherein the genetically engineered immune cells are engineered to express a cytotoxic receptor,
[0608] wherein the cytotoxic receptor comprises an extracellular ligand binding domain, a transmembrane domain, and a cytotoxic signaling complex,
[0609] wherein the immune cells are genetically edited at one or more target sites in the genome of the immune cell to yield reduced levels of expression of a protein which is encoded by a gene which comprises an edited target site as compared to a non-edited immune cell,
[0610] wherein the edits are made using an RNA-guided endonuclease,
[0611] wherein the edits result in a decrease in the frequency of cell surface expression of MHC I molecules within the population of genetically engineered immune cells, and
[0612] wherein the genetically engineered immune cells are further genetically engineered to express at least one immunosuppressive effector,
[0613] wherein the at least one immunosuppressive effector exerts suppressive effects on the cytotoxic activity of undesired cells,
[0614] wherein the undesired cells comprise one or more of non-engineered natural killer cells, non-engineered T cells, or undesired engineered cells, and
[0615] wherein the genetically engineered and edited immune cells exhibit one or more of enhanced expansion capability, enhanced cytotoxicity against target cells, and enhanced persistence, as compared to cells that do not comprise said immunosuppressive effector and said edited gene.

[0616] 3. A population of genetically engineered immune cells for cancer immunotherapy, comprising:
[0617] one or more of genetically engineered NK cells and genetically engineered T cells;
[0618] wherein the plurality of genetically engineered immune cells are engineered to express a cytotoxic receptor,
[0619] wherein the cytotoxic receptor comprises an extracellular ligand binding domain, a transmembrane domain, and a cytotoxic signaling complex,
[0620] wherein the immune cells are genetically edited at one or more target sites in the genome of the immune cell to yield reduced levels of expression of a protein which is encoded by a gene which comprises an edited target site as compared to a non-edited immune cell,
[0621] wherein the edits result in a decrease in the frequency of cell surface expression of MHC I molecules within the population of genetically engineered immune cells, and
[0622] wherein the genetically engineered immune cells are further genetically engineered to express at least one immunosuppressive effector,
[0623] wherein the at least one immunosuppressive effector exerts suppressive effects on undesired cytotoxic activity of suppressive cells,
[0624] wherein the genetically engineered immune cells exhibit one or more of enhanced expansion capability, enhanced cytotoxicity against target cells, and enhanced persistence, as compared to cells that do not comprise said immunosuppressive effector.

[0625] 4. The genetically engineered immune cells of any one of Embodiments 1 to 3, wherein the genetic edit is to a gene involved in antigen processing and/or MHC I complex assembly.

[0626] 5. The genetically engineered immune cells of any one of Embodiments 1 to 4, wherein the suppressive cells comprise host cells.

[0627] 6. The genetically engineered immune cells of any one of Embodiments 1 to 4, wherein the suppressive cells comprise one or more of non-engineered natural killer cells, non-engineered T cells, or suppressive engineered cells.

[0628] 7. The genetically engineered immune cells of Embodiment 6, wherein suppressive engineered cells comprise the genetically engineered immune cells.

[0629] 8. The genetically engineered immune cells of any one of the preceding Embodiments, wherein the cells that do not comprise said immunosuppressive effector are either non-engineered or engineered cells.

[0630] 9. The genetically engineered immune cells of any one of the preceding Embodiments, wherein the genetic edit is to one or more of UGT-1 (UGTA-1), TAPBPL (TAPBPR), TAPBP (Tapasin), TAP-1, TAP-2; ERp57; Calreticulin (CRT); Endoplasmic reticulum aminopeptidases ERAP1 and/or ERAP2, and/or one or more immunoproteasome components selected from the standard proteasome catalytic subunits β1, β2, and/or β5, and the inducible proteasome catalytic subunits LMP2, MECL-1, and/or LMP7.

[0631] 10. The genetically engineered immune cells of Embodiment 9, wherein the genetic edit is to TAPBP and/or TAP2 and reduced expression of TAPBP and/or TAP2 enables the immune cells to be used in allogeneic cancer immunotherapy with reduced host versus graft rejection as compared to immune cells expressing endogenous levels of TAPBP and/or TAP2.

[0632] 11. The genetically engineered immune cells of any one of the preceding Embodiments, wherein the cytotoxic receptor targets one or more of NKG2D ligands, CD19, BCMA, CD70, and CD38 expressed by target tumor cells.

[0633] 12. The genetically engineered immune cells of any one of the preceding Embodiments, wherein the cytotoxic signaling complex comprises an OX40 subdomain or a 4-1BB domain, and a CD3zeta subdomain.

[0634] 13. The genetically engineered immune cells of any one of Embodiments 1 to 12, wherein the at least one immunosuppressive effector comprises a virally-derived peptide.

[0635] 14. The genetically engineered immune cells of any one of Embodiments 1 to 13, wherein the at least one immunosuppressive effector comprises a peptide derived from a retrovirus.

[0636] 15. The genetically engineered immune cells of any one of Embodiments 1 to 14, wherein the at least one immunosuppressive effector comprises a peptide derived from an envelope protein of a retrovirus.

[0637] 16. The genetically engineered immune cells of any one of Embodiments 1 to 12, wherein the at least one immunosuppressive effector comprises at least a portion of a human protein and/or at least a portion of a human protein complex.

[0638] 17. The genetically engineered immune cells of any one of Embodiments 1 to 12, wherein the at least one immunosuppressive effector comprises at least a portion of human protein.

[0639] 18. The genetically engineered immune cells of any one of any one of the preceding Embodiments, wherein the at least one immunosuppressive effector comprises a chimeric construct comprises at least one virally-derived peptide and at least a portion of a human protein and/or at least a portion of a human protein complex.

[0640] 19. The genetically engineered immune cells of any one of Embodiments 1 to 18, wherein the at least one immunosuppressive effector is integrated into the cytotoxic receptor.

[0641] 20. The genetically engineered immune cells of Embodiment 19, wherein the at least one immunosuppressive effector is integrated into the cytotoxic receptor between the transmembrane domain and the extracellular ligand-binding domain.

[0642] 21. The genetically engineered immune cells of Embodiment 19, wherein the at least one immunosuppressive effector is integrated into the cytotoxic receptor within the extracellular ligand-binding domain.

[0643] 22. The genetically engineered immune cells of Embodiment 21 wherein the extracellular ligand-binding domain comprises an scFv and the at least one immunosuppressive effector is integrated into a linker region of the scFv.

[0644] 23. The genetically engineered immune cells of Embodiment 19, wherein the at least one immunosuppressive effector is integrated into the cytotoxic receptor within an N-terminal region of the cytotoxic receptor distally positioned from the extracellular ligand-binding domain.

[0645] 24. The genetically engineered immune cells of any one of Embodiments 1 to 23, wherein the at least one immunosuppressive effector is integrated into the cytotoxic receptor at a plurality of locations within an extracellular region of the cytotoxic receptor.

[0646] 25. The genetically engineered immune cells of any one of Embodiments 1 to 18, wherein the at least one immunosuppressive effector is bound to an extracellular membrane of the immune cells.

[0647] 26. The genetically engineered immune cells of any one of Embodiments 1 to 18, wherein the at least one immunosuppressive effector comprises a transmembrane protein.

[0648] 27. The genetically engineered immune cells of Embodiment 26, wherein the transmembrane protein is selected from CD8α, CD4, CD3ε, CD3γ, CD3δ, CD3ζ, CD28, CD137, glycophorin A, glycophorin D, nicotinic acetylcholine receptor, a GABA receptor, FcεRIγ, and a T-cell receptor.

[0649] 28. The genetically engineered immune cells of Embodiment 26 or 27, wherein the transmembrane protein comprises a CD8α transmembrane protein.

[0650] 29. The genetically engineered immune cells of Embodiment 26, 27, or 28, wherein immunosuppressive effector is expressed on the immune cells by a disulfide trap single chain trimer (dtSCT).

[0651] 30. The genetically engineered immune cells of any one of Embodiments 1 to 29, wherein the immunosuppressive effector is encoded by a nucleic acid or comprises a peptide having at least 85% sequence identity to one or more of the nucleotide or amino acid sequences of SEQ ID NOs: 683-894 or 997-1000.

[0652] 31. The genetically engineered immune cells of any one of Embodiments 1 to 30, wherein the immunosuppressive effector comprises a peptide having at least 95% sequence identity to SEQ ID NO: 830, 997, 999, or 689.

[0653] 32. The genetically engineered immune cells of any one of Embodiments 1 to 31, wherein the immunosuppressive effector is encoded by a nucleic acid having at least 95% sequence identity to SEQ ID NO: 829, 998, 1000, or 690.

[0654] 33. The genetically engineered immune cells of any one of the preceding Embodiments, wherein the immune cells comprise genetically engineered Natural Killer (NK) cells, genetically engineered T cells, or combinations thereof.

[0655] 34. The genetically engineered immune cells of any one of the preceding Embodiments, wherein the genetically engineered immune cells are suitable for use in allogeneic cancer cell therapy with reduced risk of graft versus host disease.

[0656] 35. The genetically engineered immune cells of any one of the preceding Embodiments, wherein the genetically engineered immune cells are suitable for use in allogeneic cancer cell therapy with reduced risk of cytotoxic activity between the genetically engineered immune cells.

[0657] 36. The genetically engineered immune cells of any one of the preceding Embodiments, wherein at least a portion of the genetically engineered immune cells are engineered to express membrane bound IL-15.

[0658] 37. A method for the treatment of cancer in a subject comprising administering to the subject genetically engineered immune cells according to any of the preceding Embodiments.

[0659] 38. Use of genetically engineered immune cells according to any of Embodiments 1 to 37 for the treatment of cancer.

[0660] 39. Use of genetically engineered immune cells according to any of Embodiments 1 to 37 for the preparation of a medicament for the treatment of cancer.

[0661] 40. A method of manufacturing a population of genetically engineered immune cells for cancer immunotherapy, comprising:
[0662] contacting a population of immune cells with an RNA-guided endonuclease to genetically edit one or more target sites in the genome of the immune cell to yield reduced levels of expression of a protein which is encoded by a gene which comprises an edited target site as compared to a non-edited immune cell,
[0663] wherein the edit results in a decrease in the frequency of cell surface expression of major MHC I molecules within the population of genetically engineered immune cells, and;
[0664] contacting the population of immune cells with a polynucleotide encoding a cytotoxic receptor comprising an extracellular ligand binding domain, a transmembrane domain, and a cytotoxic signaling complex;
[0665] contacting the population of immune cells with an additional polynucleotide encoding at least one immunosuppressive effector,
[0666] wherein the immunosuppressive effector is encoded by a nucleic acid or comprises a peptide having at least 85% sequence identity to one or more of the nucleotide or amino acid sequences of SEQ ID NOs: 683-894 or 997-1000;
[0667] wherein the at least one immunosuppressive effector exerts suppressive effects on the cytotoxic activity of suppressive cells,
[0668] and wherein the genetically engineered immune cells exhibit one or more of enhanced expansion capability, enhanced cytotoxicity against target cells, and enhanced persistence, as compared to cells that do not comprise said at least one immunosuppressive effector.

[0669] 41. The method of Embodiment 40, wherein the genetic edit is to one or more of UGT-1 (UGTA-1), TAPBPL (TAPBPR), TAPBP (Tapasin), TAP-1, TAP-2; ERp57; Calreticulin (CRT); Endoplasmic reticulum aminopeptidases ERAP1 and/or ERAP2, and/or one or more immunoproteasome components selected from the standard proteasome catalytic subunits β1, β2, and/or β5, and the inducible proteasome catalytic subunits LMP2, MECL-1, and/or LMP7.

[0670] 42. The method of Embodiment 40 or 41, wherein an additional genetic edit is made to one or more of a CISH gene, a CBLB gene, a B2M gene, a CD70 gene, an adenosine receptor gene, an NKG2A gene, a CIITA gene, a TGFBR gene, or any combination thereof.

[0671] 43. A population of genetically engineered immune cells for cancer immunotherapy, comprising:
[0672] genetically engineered immune cells that express a cytotoxic receptor comprising an extracellular ligand binding domain, a transmembrane domain, and a cytotoxic signaling complex,
[0673] wherein the immune cells are genetically edited at one or more target sites in the genome of the immune cell to yield reduced levels of expression of a protein which is encoded by a gene which comprises an edited target site as compared to a non-edited immune cell,
[0674] wherein the edits are made using a Crispr/Cas system, and
[0675] wherein the edits result in a decrease in the frequency of cell surface expression of MHC I molecules within the population of genetically engineered immune cells, and
[0676] wherein the genetically engineered and edited immune cells exhibit one or more of enhanced expansion capability, enhanced cytotoxicity against target cells, and enhanced persistence, as compared to cells that do not comprise said edited gene.

[0677] 44. A population of genetically engineered immune cells for cancer immunotherapy, comprising:
[0678] one or more of genetically engineered NK cells and genetically engineered T cells;
[0679] wherein the genetically engineered immune cells are engineered to express a cytotoxic receptor,
[0680] wherein the cytotoxic receptor comprises an extracellular ligand binding domain, a transmembrane domain, and a cytotoxic signaling complex,
[0681] wherein the immune cells are genetically edited at one or more target sites in the genome of the immune cell to yield reduced levels of expression of a protein which is encoded by a gene which comprises an edited target site as compared to a non-edited immune cell,
[0682] wherein the edits are made using an RNA-guided endonuclease, and
[0683] wherein the edits result in a decrease in the frequency of cell surface expression of MHC I molecules within the population of genetically engineered immune cells, and
[0684] wherein the genetically engineered and edited immune cells exhibit one or more of enhanced expansion capability, enhanced cytotoxicity against target cells, an enhanced persistence, as compared to cells that do not comprise said edited gene.

[0685] 45. The genetically engineered immune cells of Embodiment 43 or 44, wherein the genetic edit is to one or more of UGT-1 (UGTA-1), TAPBPL (TAPBPR), TAPBP (Tapasin), TAP-1, TAP-2; ERp57; Calreticulin (CRT); Endoplasmic reticulum aminopeptidases ERAP1 and/or ERAP2, and/or one or more immunoproteasome components selected from the standard proteasome catalytic subunits β1, β2, and/or β5, and the inducible proteasome catalytic subunits LMP2, MECL-1, and/or LMP7.

[0686] 46. The genetically engineered immune cells of Embodiment 45, wherein the genetic edit is to TAPBP and/or TAP2 and reduced expression of TAPBP and/or TAP2 enables the immune cells to be used in allogeneic cancer immunotherapy with reduced host versus graft rejection as compared to immune cells expressing endogenous levels of TAPBP and/or TAP2.

[0687] 47. The genetically engineered immune cells of any one of Embodiments 43 to 46, further comprising at least one immunosuppressive effector exerts suppressive effects on undesired cytotoxic activity of suppressive cells.

[0688] 48. The genetically engineered immune cells of Embodiment 47, wherein the suppressive cells comprise host cells.

[0689] 49. The genetically engineered immune cells of Embodiment 47, wherein the suppressive cells comprise one or more of non-engineered natural killer cells, non-engineered T cells, or suppressive engineered cells.

[0690] 50. The genetically engineered immune cells of Embodiment 49, wherein suppressive engineered cells comprise the genetically engineered immune cells.

[0691] 51. The genetically engineered immune cells of any one of Embodiments 43 to 50, wherein the cells that do not comprise said immunosuppressive effector are either non-engineered or engineered cells.

[0692] 52. The genetically engineered immune cells of any one of Embodiments 47 to 51, wherein the immunosuppressive effector is encoded by a nucleic acid or comprises a peptide having at least 85% sequence identity to one or more of the nucleotide or amino acid sequences of SEQ ID NOs: 683-894 or 997-1000, wherein the immunosuppressive effector comprises at least a portion of an HLA-E molecule, and/or wherein the immunosuppressive effector comprises at least a portion of CD47.

[0693] 53. A population of genetically engineered immune cells for cancer immunotherapy, comprising:
[0694] a subpopulation of genetically engineered NK cells and a subpopulation of genetically engineered T cells,
[0695] wherein each of the subpopulations comprise an engineered cytotoxic receptor,
[0696] wherein each of the subpopulations comprises a genetic edit to a gene encoding TAP-2 and/or TAPBP, resulting in a decrease in the frequency of MHC I molecules within each subpopulation, and
[0697] wherein the genetically engineered and edited immune cells exhibit one or more of enhanced expansion capability, enhanced cytotoxicity against target cells, and enhanced persistence, as compared to cells that do not comprise said edited genetic edits.

[0698] 54. A population of genetically engineered immune cells for cancer immunotherapy, comprising:
[0699] a subpopulation of genetically engineered NK cells and a subpopulation of genetically engineered T cells,
[0700] wherein each of the subpopulations comprise an engineered cytotoxic receptor,
[0701] wherein each of the subpopulations comprises a genetic edit to a gene involved in antigen processing and/or MHC I complex assembly, resulting in a decrease in the frequency of MHC I molecules within each subpopulation, and
[0702] wherein the genetically engineered and edited immune cells exhibit one or more of enhanced expansion capability, enhanced cytotoxicity against target cells, and enhanced persistence, as compared to cells that do not comprise said edited genetic edits.

[0703] 55. A method for the treatment of cancer in a subject comprising administering to the subject genetically engineered immune cells according to any of Embodiments 43 to 54.

[0704] 56. Use of genetically engineered immune cells according to any of Embodiments 43 to 54 for the treatment of cancer.

[0705] 57. Use of genetically engineered immune cells according to any of Embodiments 43 to 54 for the preparation of a medicament for the treatment of cancer.

[0706] 58. A method of manufacturing a population of genetically engineered immune cells for cancer immunotherapy, comprising:
[0707] contacting a population of immune cells with an RNA-guided endonuclease to genetically edit one or more target sites in the genome of the immune cell to yield reduced levels of expression of a protein which is encoded by a gene which comprises an edited target site as compared to a non-edited immune cell,
[0708] wherein the edit results in a decrease in the frequency of cell surface expression of MHC I molecules within the population of genetically engineered immune cells, and;
[0709] contacting the population of immune cells with an additional polynucleotide encoding at least one immunosuppressive effector,
[0710] wherein the immunosuppressive effector is encoded by a nucleic acid or comprises a peptide having at least 85% sequence identity to one or more of the nucleotide or amino acid sequences of SEQ ID NOs: 683-894 or 997-1000;
[0711] wherein the at least one immunosuppressive effector exerts suppressive effects on the cytotoxic activity of suppressive cells,
[0712] and wherein the genetically engineered immune cells exhibit one or more of enhanced expansion capability, enhanced cytotoxicity against target cells, and enhanced persistence, as compared to cells that do not comprise said at least one immunosuppressive effector.

[0713] 59. A method of enhancing the persistence of immune cells for use in allogeneic therapy, comprising:
[0714] contacting a population of immune cells with an RNA-guided endonuclease to genetically edit one or more target sites in the genome of the immune cell to yield reduced levels of expression of a protein which is encoded by a gene which comprises an edited target site as compared to a non-edited immune cell,
[0715] wherein the edit results in a decrease in the frequency of cell surface expression of MHC I molecules within the population of genetically engineered immune cells, and;
[0716] and wherein the genetically edited immune cells are less likely to trigger cytotoxic effects from one or more of host NK or T cells, thereby exhibiting enhanced persistence, as compared to cells that do not comprise said gene edit.

[0717] 60. A method of enhancing the persistence of immune cells for use in allogeneic therapy, comprising:
[0718] contacting a population of immune cells with an RNA-guided endonuclease to genetically edit one or more target sites in the genome of the immune cell to yield reduced levels of expression of a protein which is encoded by a gene which comprises an edited target site as compared to a non-edited immune cell,
[0719] wherein the edit is to a gene involved in antigen processing and/or MHC I complex assembly; and
[0720] wherein the genetically edited immune cells are less likely to trigger cytotoxic effects from one or more of host NK or T cells, thereby exhibiting enhanced persistence, as compared to cells that do not comprise said gene edit.

[0721] 61. The method of any one of Embodiments 58 to 60, wherein the genetic edit is to one or more of UGT-1 (UGTA-1), TAPBPL (TAPBPR), TAPBP (Tapasin), TAP-1, TAP-2; ERp57; Calreticulin (CRT); Endoplasmic reticulum aminopeptidases ERAP1 and/or ERAP2, and/or one or more immunoproteasome components selected from the standard proteasome catalytic subunits β1, β2, and/or β5, and the inducible proteasome catalytic subunits LMP2, MECL-1, and/or LMP7.

[0722] 62. The method of any one of Embodiments 58 to 61, wherein an additional genetic edit is made to one or more of a CISH gene, a CBLB gene, a B2M gene, a CD70 gene, an adenosine receptor gene, an NKG2A gene, a CIITA gene, a TGFBR gene, or any combination thereof.

[0723] 63. The method of any one of Embodiments 58 to 62, further comprising contacting the population of immune cells with a polynucleotide encoding a cytotoxic receptor comprising an extracellular ligand binding domain, a transmembrane domain, and a cytotoxic signaling complex.

[0724] 64. The method of any one of Embodiments 58 to 63, wherein the population of immune cells comprises NK cells, T cells and/or NK and T cells.

### EXAMPLES

[0725] The following are non-limiting descriptions of experimental methods and materials that were used in examples disclosed below.

### Example 1—Disruption of MHC I Presentation Pathway Genes to Confer Resistance to Cytotoxicity

[0726] As discussed herein, allogeneic cell populations for immunotherapy are subject to potential reduced lifespan when administered due to host versus graft rejection. This is in addition to potential graft versus host issues that can arise, as well as fratricide among the cells to be administered. The major histocompatibility complex (MHC), which in humans is referred to as human leukocyte antigen (HLA), relates to a group of genes encoding a variety of cell surface markers, antigen-presenting molecules, and other proteins involved in immune function, which mediate such host versus graft and graft versus host rejections. In order to reduce host versus graft rejection, therapeutic cells can, in several embodiments, be edited, for example by knocking out B2M expression, which eliminates expression of HLA class I molecules from the surface of the cells (see, for example FIG. 8H). However, complete HLA class I removal can result in in vulnerability of the allogeneic product to fratricide (e.g., from a co-administered NK cell bearing a CAR) and/or elimination by host NK cells (since the HLA-negative cells are missing a normally expressed self signal). As disclosed herein and in PCT Patent Application No. PCT/US2021/072715 (which is incorporated in its entirety by reference herein), engineered expression of HLA-E, CD47, and/or viral immunosuppressive peptides can restore inhibition of the cytotoxic activity of NK cells (host or co-administered) and increase the persistence of the allogeneic cell product (including mixtures of NK cells and T cells). Experiments were undertaken to evaluate alternative approaches to complete B2M knockout (and resulting lack of MHC I surface expression). Rather, in several embodiments, the frequency of expression of B2M is reduced (not eliminated) methods are used to reduce MHC I surface expression (to avoid the cells being targeted by host T cells, or co-administered T cells), but still maintain sufficient levels of MHC I expression to inhibit the cytotoxic activities of host NK cells (or co-administered NK cells) against the edited cells.

[0727] As discussed above, various approaches can be used to reduce, but not eliminate, MHC I expression. In several embodiments, B2M expression is reduced temporarily using RNA interference. In some embodiments, viral protein expression can reduce MHC expression. In some embodiments gene editing to knockout expression of genes that function in the MHC I antigen expression pathway is used. Combinations of these approaches are used in several embodiments.

[0728] The present examples explore gene edits made to disrupt the secretory pathway by which peptide-loaded MHC I molecules are transported to the plasma membrane.

[0729] ATP-Binding Cassette (ABC) transporters comprise membrane proteins that translocate a wide variety of substrates across extra- and intracellular membranes. One such family (ABCB, also known as MDR/TAP) plays a crucial role in the processing and presentation of MHC I antigens. As depicted schematically in FIG. 25 (adapted from Pfisterer et al., Brazilian Journal of Allergy and Immunology (BJAI) 2014), TAP1 and TAP2 function to translocate the peptides into the endoplasmic reticulum.

[0730] Calreticulin (CRT) is a calcium-binding chaperone that, in the ER, facilitates folding of MHC I molecules along with the related MHC I recruitment/assembly factor, Tapasin. The thiol oxidoreductase ERp57 has been found to interact with Tapasin, and in its absence, the recruitment of MHC class I molecules into this complex by Tapasin significantly reduced. In addition to Tapasin, an additional intracellular peptide editor TABPR (also called TABPL; not shown in FIG. 25) functions to select/exchange peptides for attachment to MHC I. Acting as a quality control protein, UDP-glucose:glycoprotein glucosyltransferase 1 (UGT1, also known as UGTA-1) recognizes misfolded proteins/peptides due to lack of glycosylation and re-glycosylates them, allowing proper folding. It has been determined that while peptide formation still occurs in the absence of UGT-1 (there are redundancies in the folding process), surface level of MHC I is reduced, maturation and assembly are delayed, and peptide selection is impaired (Zhang et al., PNAS (2011) 108(12): 4956-61).

[0731] FIG. 16 shows a non-limiting experimental schematic to evaluate the effect of reduction of MHC I expression on the persistence of T cells, in a mixed NK+T cell population. At Day 0, T cells are purified and electroporated with a guide RNA targeting a gene of interested in the MHC I pathway, such as UGT-1 (UGTA-1); TAPBPL (TAPBPR); TAPBP (Tapasin); TAP-1; TAP-2; ERp57; Calreticulin (CRT); Endoplasmic reticulum aminopeptidases (ERAP1, ERAP2) and/or immunoproteasome components. Gene edits were made using a Crispr/Cas9 complex and a guide RNA in this study, though as described herein, other methods are used in additional embodiments. T cells are then expanded using CD3/CD28 antibody-containing stimulatory beads according to art-established methods. The stimulatory beads are removed at Day 2 and the expression of MHC I is evaluated at one or more time points during continued culture of the cells, for example Day 5 and/or Day 9. In a parallel system, on Day 2, NK cells are expanded in culture. On Day 8 the NK cells are transduced with a vector encoding an anti-CD19 CAR. In additional embodiments, other CARs are used. At Day 12, the NK and T cells are co-cultured at a desired ratio, with an additional phenotype assessment and/or survival assessment of the T and/or NK cells one day (Day 13) and two days (Day 15) after inception of co-culture.

[0732] FIGS. 17A-17D show data from the initial MHC I phenotype assessment that takes place during expansion of the T cells after gene knockdown. FIG. 17A shows flow cytometry data assessing the expression of MHC I (using an anti-HLA-ABC antibody) after gene editing the gene encoding UGTA-1, TAPBPL, B2M, TAPBP (or an electroporation only control). This assessment was for cells obtained from a first donor and was performed 5 days post-editing. As would be expected, the gene editing of B2M resulted in substantial decrease in the amount of HLA detected, with TAPBP also showing a reduction. FIG. 17B shows data for each group in two formats. The central column shows the percentage of T cells evaluated that express HLA-ABC (MHC I). Consistent with the image of FIG. 17A, the most marked decrease was in the B2M edited group. The right column of FIG. 17B shows the mean fluorescence intensity (MFI) of the T cells evaluated, which reflects the degree (intensity) to which the population expresses MHC I. Thus, for example, fewer cells in the B2M-edited group actually express MHC I, but those that do express it, express it at levels similar to electroporated controls. In contrast, with the TAPBP group, while 99.5% of the population express MHC I, on average, each cell in the population expresses a lower amount of MHC I (circled value). FIGS. 17C-17D show similar data for cells from a second donor, with the evaluation being performed 7 days post-editing. A similar pattern is seen with the edits, in that B2M editing reduces the number of cells expressing MHC I, but not the mean amount expressed by each of the cells in the population. In contrast, cells edited to knockout either TAP-2 or TAPBP showed a reduced MFI (circled values), indicating that the amount of MHC I expressed by each of the cells is reduced, despite nearly 100% of the population still expressing some amount of MHC I.

[0733] FIGS. 18A-18B show corresponding data for the first donor, at 9 days post-edit. FIGS. 18C-18D show corresponding data for the second donor, also at 9 days post-edit. Consistent with the data above from the earlier timepoint, TAPBP gene edits in the first donor resulted in reduced MHC I MFI (circled value). In the second donor, edits to both TAP-2 and TAPBP resulted in reduced MHC I expression ((circled values).

[0734] FIGS. 19A and 19B show agarose gel electrophoresis separation of DNA amplicons for the indicated gene (and condition, either EP control or edited) for the first donor (19A) and the second donor (19B). As can be seen, many of the gene edited samples show a size difference (smaller) than the corresponding control, which is consistent with a deletion of a region of the amplicon between the two corresponding PCR primers, which yields the shorter amplicon. These data show that the CRISPR editing is effective and, according to some embodiments, can be used to edit certain genes in the MHC I processing/peptide loading pathway to reduce the degree of MHC I expression by an edited cell.

[0735] FIGS. 20A-20C show data from the first donor from the gene edit/expression, phenotype and expression degree of expression of edited T cells and CAR-expressing NK cells after 1 day of co-culture. Consistent with the data discussed above, edits to TAPBP yielded reduced mean MHC expression (20A-20B) and a greater T cell percentage as compared to those T cells edited at B2M. Those cells edited at B2M, due to that portion of the population lacking MHC expression (but with the MHC-expressing cells expressing at approximately normal levels) are subject to NK cell-based cytotoxicity. In contrast, the T cells edited at TAPBP (or other genes disclosed herein, in several embodiments) are maintained at a higher percentage in the co-culture, because the maintenance of some degree of expression of MHC I by nearly all the edited cells helps reduce the NK cell-based cytotoxic activity against the edited T cells. Similar data is shown for the second donor in FIGS. 21A-21C. Again, the reduced mean expression of MHC I after edits to TAP-2 or TAPBP conferred a greater degree of persistence to those populations of T cells, as compared to B2M-edited T cells (see FIG. 21C).

[0736] FIGS. 22A-22C show corresponding data from the first donor at three days post-coculture. In this particular experiment there was not a significant reduction in the MHC I for any of the groups and as such, the T cells were nearly absent from the co-culture at three days. Shown in FIGS. 23A-23C, the edited cells from the second donor did exhibit reduced mean MHC I expression when edited at TAP-2 and TAPBP (circled values in 23B). While much of the T cells were eliminated after three days, the percentage of T cells did appear to be greater for these groups compared to B2M edited cells (23C). Accordingly, in some embodiments, additional manipulation or edits to the cells are made to confer enhanced persistence to the T cells (or NK cells, depending on the embodiment). For example, in several embodiments, use of the viral immunosuppressive peptides disclosed herein in conjunction with reducing mean MHC I expression across the population functions to strike a balance between avoiding cytotoxicity from NK cells and host T cells.

[0737] A more detailed assessment of T cell survival during NK+T co-culture using varied NK:T ratios with gene edited cells from the second donor is shown in FIGS. 24A-24C. In FIG. 24A, a 2:1 NK:T ratio was used, with T cells being labeled through retroviral GFP labeling/detection. As can be seen from the traces, the EP control T cells were maintained at approximately starting culture levels over the 70 hours co-culture period. Each of the TAP-2, TAPBP and B2M knockouts showed reduced T cell numbers over time. Despite not reducing MHC I mean expression, TAP-1 knockout cells persisted reasonably well, though perhaps for other reasons unrelated to the MHC I mode of action. That said, TAP-2 and TAPBP-edited cells did appear to remain at levels moderately above the B2M-edited group. Moving to a 1:2 NK:T cell ratio in FIG. 24B, the TAP-2 and TAPBP knockouts show substantially better maintenance of T cells within the mixed population. It also appears that the decline in T cells occurs after some delay as compared to the 2:1 ratio in FIG. 24A. Moving to a 1:1 NK:T ratio in FIG. 24C, even at matched cell numbers, the TAP-2 and TAPBP knockouts still exhibit greater persistence as compared to B2M-edited cells, representing their enhanced resistance to cytotoxic effects of NK cells. Thus, according to some embodiments, the edits of genes involved in the processing/presentation of peptides by MHC I can advantageously reduce average MHC I expression by edited T cells, without eliminating its expression, which allows the balance between avoiding cytotoxic effects from NK cells and host T cells. In several embodiments, synergy can be found between two or more of such genes being edited and/or optionally expressing another protein (or protein complex) to reduce the cytotoxic effects of NK cells (whether host or co-administered cells).

[0738] It is contemplated that various combinations or subcombinations of the specific features and aspects of the embodiments disclosed above may be made and still fall within one or more of the inventions. Further, the disclosure herein of any particular feature, aspect, method, property, characteristic, quality, attribute, element, or the like in connection with an embodiment can be used in all other embodiments set forth herein. Accordingly, it should be understood that various features and aspects of the disclosed embodiments can be combined with or substituted for one another in order to form varying modes of the disclosed inventions. Thus, it is intended that the scope of the present inventions herein disclosed should not be limited by the particular disclosed embodiments described above. Moreover, while the invention is susceptible to various modifications, and alternative forms, specific examples thereof have been shown in the drawings and are herein described in detail. It should be understood, however, that the invention is not to be limited to the particular forms or methods disclosed, but to the contrary, the invention is to cover all modifications, equivalents, and alternatives falling within the spirit and scope of the various embodiments described and the appended claims. Any methods disclosed herein need not be performed in the order recited. The methods disclosed herein include certain actions taken by a practitioner; however, they can also include any third-party instruction of those actions, either expressly or by implication. In addition, where features or aspects of the disclosure are described in terms of Markush groups, those skilled in the art will recognize that the disclosure is also thereby described in terms of any individual member or subgroup of members of the Markush group.

[0739] The ranges disclosed herein also encompass any and all overlap, sub-ranges, and combinations thereof. Language such as “up to,” “at least,” “greater than,” “less than,” “between,” and the like includes the number recited. Numbers preceded by a term such as “about” or “approximately” include the recited numbers. For example, “about 90%” includes “90%.” In some embodiments, at least 95% sequence identity or homology includes 96%, 97%, 98%, 99%, and 100% sequence identity or homology to the reference sequence. In addition, when a sequence is disclosed as “comprising” a nucleotide or amino acid sequence, such a reference shall also include, unless otherwise indicated, that the sequence “comprises”, “consists of” or “consists essentially of” the recited sequence. Any titles or subheadings used herein are for organization purposes and should not be used to limit the scope of embodiments disclosed herein.

[0740] All references cited herein, including but not limited to published and unpublished applications, patents, and literature references, are incorporated herein by reference in their entirety and are hereby made a part of this specification. To the extent publications and patents or patent applications incorporated by reference contradict the disclosure contained in the specification, the specification is intended to supersede and/or take precedence over any such contradictory material.

### Sequences

[0741] In several embodiments, there are provided amino acid sequences that correspond to any of the nucleic acids disclosed herein (and/or included in the accompanying sequence listing), while accounting for degeneracy of the nucleic acid code. Furthermore, those sequences (whether nucleic acid or amino acid) that vary from those expressly disclosed herein (and/or included in the accompanying sequence listing), but have functional similarity or equivalency are also contemplated within the scope of the present disclosure. The foregoing includes mutants, truncations, substitutions, or other types of modifications. Additionally, it shall be appreciated that certain nucleic acid sequences, even if not expressly included within the sequence, comprise one of the three standard stop codons (TAA, TAG, or TGA) known in the standard genetic code. In accordance with some embodiments described herein, any of the sequences may be used, or a truncated or mutated form of any of the sequences disclosed herein (and/or included in the accompanying sequence listing) may be used and in any combination. A Sequence Listing in electronic format is submitted herewith. Some of the sequences provided in the Sequence Listing may be designated as Artificial Sequences by virtue of being non-naturally occurring fragments or portions of other sequences, including naturally occurring sequences. Some of the sequences provided in the Sequence Listing may be designated as Artificial Sequences by virtue of being combinations of sequences from different origins, such as humanized antibody sequences.

The application's sequence listing, which the Patent Office published only in electronic form, follows.

SEQUENCE LISTING (1098 sequences)

SEQ ID NO: 1 - DNA, 135 bp, synthetic construct
  source 1..135: mol_type = other DNA
accacgacgccagcgccgcgaccaccaacaccggcgcccaccatcgcgtcgcagcccctgtccctgcgcccagaggcgtgccggccagcggcggggggcgcagtgcacacgagggggctggacttcgcctgtgat

SEQ ID NO: 2 - protein, 45 aa, synthetic construct
TTTPAPRPPTPAPTIASQPLSLRPEACRPAAGGAVHTRGLDFACD

SEQ ID NO: 3 - DNA, 63 bp, synthetic construct
  source 1..63: mol_type = other DNA
atctacatctgggcgcccttggccgggacttgtggggtccttctcctgtcactggttatcacc

SEQ ID NO: 4 - protein, 21 aa, synthetic construct
IYIWAPLAGTCGVLLLSLVIT

SEQ ID NO: 5 - DNA, 111 bp, synthetic construct
  source 1..111: mol_type = other DNA
cggagggaccagaggctgccccccgatgcccacaagccccctgggggaggcagtttccggacccccatccaagaggagcaggccgacgcccactccaccctggccaagatc

SEQ ID NO: 6 - protein, 37 aa, synthetic construct
RRDQRLPPDAHKPPGGGSFRTPIQEEQADAHSTLAKI

SEQ ID NO: 7 - DNA, 336 bp, synthetic construct
  source 1..336: mol_type = other DNA
agagtgaagttcagcaggagcgcagacgcccccgcgtaccagcagggccagaaccagctctataacgagctcaatctaggacgaagagaggagtacgatgttttggacaagagacgtggccgggaccctgagatggggggaaagccgagaaggaagaaccctcaggaaggcctgtacaatgaactgcagaaagataagatggcggaggcctacagtgagattgggatgaaaggcgagcgccggaggggcaaggggcacgatggcctttaccagggtctcagtacagccaccaaggacacctacgacgcccttcacatgcaggccctgccccctcgc

SEQ ID NO: 8 - protein, 112 aa, synthetic construct
RVKFSRSADAPAYQQGQNQLYNELNLGRREEYDVLDKRRGRDPEMGGKPRRKNPQEGLYNELQKDKMAEAYSEIGMKGERRRGKGHDGLYQGLSTATKDTYDALHMQALPPR

SEQ ID NO: 9 - DNA, 63 bp, synthetic construct
  source 1..63: mol_type = other DNA
ggctctggcgagggaaggggttccctgcttacttgcggcgacgtcgaagagaatcccggtccg

SEQ ID NO: 10 - protein, 21 aa, synthetic construct
GSGEGRGSLLTCGDVEENPGP

SEQ ID NO: 11 - DNA, 342 bp, synthetic construct
  source 1..342: mol_type = other DNA
aactgggtcaacgtgattagcgatttgaagaaaatcgaggaccttatacagtctatgcatattgacgctacactgtatactgagagtgatgtacacccgtcctgtaaggtaacggccatgaaatgctttcttctggagctccaggtcatcagcttggagtctggggacgcaagcatccacgatacggttgaaaacctcatcatccttgcgaacaactctctctcatctaatggaaacgttacagagagtgggtgtaaggagtgcgaagagttggaagaaaaaaacatcaaagaatttcttcaatccttcgttcacatagtgcaaatgttcattaacacgtcc

SEQ ID NO: 12 - protein, 114 aa, synthetic construct
NWVNVISDLKKIEDLIQSMHIDATLYTESDVHPSCKVTAMKCFLLELQVISLESGDASIHDTVENLIILANNSLSSNGNVTESGCKECEELEEKNIKEFLQSFVHIVQMFINTS

SEQ ID NO: 13 - DNA, 207 bp, synthetic construct
  source 1..207: mol_type = other DNA
actaccacacccgccccgaggccacctacgccggcaccgactatcgccagtcaacccctctctctgcgccccgaggcttgccggcctgcggctggtggggcggtccacacccggggcctggattttgcgtgcgatatatacatctgggcacctcttgccggcacctgcggagtgctgcttctctcactcgttattacgctgtactgc

SEQ ID NO: 14 - protein, 66 aa, synthetic construct
TTTPAPRPPTPAPTIASQPLSLRPEACRPAAGGAVHTRGLDFACDIYIWAPLAGTCGVLLLSLVIT

SEQ ID NO: 15 - DNA, 30 bp, synthetic construct
  source 1..30: mol_type = other DNA
ggcggtggtggctctggtggtggcggcagc

SEQ ID NO: 16 - protein, 10 aa, synthetic construct
GGGGSGGGGS

SEQ ID NO: 17 - DNA, 30 bp, synthetic construct
  source 1..30: mol_type = other DNA
ggccaggccggctccggaggaggaggatcc

SEQ ID NO: 18 - protein, 10 aa, synthetic construct
GQAGSGGGGS

SEQ ID NO: 19 - DNA, 12 bp, synthetic construct
  source 1..12: mol_type = other DNA
ggccaggccggc

SEQ ID NO: 20 - protein, 4 aa, synthetic construct
GQAG

SEQ ID NO: 21 - DNA, 33 bp, synthetic construct
  source 1..33: mol_type = other DNA
ggcggcggcggtagcggtggtggcggctccgga

SEQ ID NO: 22 - protein, 11 aa, synthetic construct
GGGGSGGGGSG

SEQ ID NO: 23 - DNA, 18 bp, synthetic construct
  source 1..18: mol_type = other DNA
ggccaggccggctccgga

SEQ ID NO: 24 - protein, 6 aa, synthetic construct
GQAGSG

SEQ ID NO: 25 - DNA, 405 bp, synthetic construct
  source 1..405: mol_type = other DNA
ttattcaaccaagaagttcaaattcccttgaccgaaagttactgtggcccatgtcctaaaaactggatatgttacaaaaataactgctaccaattttttgatgagagtaaaaactggtatgagagccaggcttcttgtatgtctcaaaatgccagccttctgaaagtatacagcaaagaggaccaggatttacttaaactggtgaagtcatatcattggatgggactagtacacattccaacaaatggatcttggcagtgggaagatggctccattctctcacccaacctactaacaataattgaaatgcagaagggagactgtgcactctatgcctcgagctttaaaggctatatagaaaactgttcaactccaaatacgtacatctgcatgcaaaggactgtg

SEQ ID NO: 26 - protein, 135 aa, synthetic construct
LFNQEVQIPLTESYCGPCPKNWICYKNNCYQFFDESKNWYESQASCMSQNASLLKVYSKEDQDLLKLVKSYHWMGLVHIPTNGSWQWEDGSILSPNLLTIIEMQKGDCALYASSFKGYIENCSTPNTYICMQRTV

SEQ ID NO: 27 - DNA, 645 bp, synthetic construct
  source 1..645: mol_type = other DNA
gggtggattcgtggtcggaggtctcgacacagctgggagatgagtgaatttcataattataacttggatctgaagaagagtgatttttcaacacgatggcaaaagcaaagatgtccagtagtcaaaagcaaatgtagagaaaatgcatctccattttttttctgctgcttcatcgctgtagccatgggaatccgtttcattattatggtaacaatatggagtgctgtattcctaaactcattattcaaccaagaagttcaaattcccttgaccgaaagttactgtggcccatgtcctaaaaactggatatgttacaaaaataactgctaccaattttttgatgagagtaaaaactggtatgagagccaggcttcttgtatgtctcaaaatgccagccttctgaaagtatacagcaaagaggaccaggatttacttaaactggtgaagtcatatcattggatgggactagtacacattccaacaaatggatcttggcagtgggaagatggctccattctctcacccaacctactaacaataattgaaatgcagaagggagactgtgcactctatgcctcgagctttaaaggctatatagaaaactgttcaactccaaatacgtacatctgcatgcaaaggactgtg

SEQ ID NO: 28 - DNA, 405 bp, synthetic construct
  source 1..405: mol_type = other DNA
ctgttcaatcaggaagtccagatccccctgacagagtcttactgcggcccatgtcccaagaactggatctgctacaagaacaattgttatcagttctttgacgagagcaagaactggtatgagtcccaggcctcttgcatgagccagaatgcctctctgctgaaggtgtacagcaaggaggaccaggatctgctgaagctggtgaagtcctatcactggatgggcctggtgcacatccctacaaacggctcttggcagtgggaggacggctccatcctgtctccaaatctgctgaccatcatcgagatgcagaagggcgattgcgccctgtacgccagctccttcaagggctatatcgagaactgctccacacccaatacctacatctgtatgcagaggaccgtg

SEQ ID NO: 29 - DNA, 126 bp, synthetic construct
  source 1..126: mol_type = other DNA
aaacggggcagaaagaaactcctgtatatattcaaacaaccatttatgagaccagtacaaactactcaagaggaagatggctgtagctgccgatttccagaagaagaagaaggaggatgtgaactg

SEQ ID NO: 30 - protein, 28 aa, synthetic construct
FWVLVVVGGVLACYSLLVTVAFIIFWVR

SEQ ID NO: 31 - protein, 39 aa, synthetic construct
KRSRLLHSDYMNMTPRRPGPTRKHYQPYAPPRDFAAYRS

SEQ ID NO: 32 - protein, 123 aa, synthetic construct
DIQMTQTTSSLSASLGDRVTISCRASQDISKYLNWYQQKPDGTVKLLIYHTSRLHSGVPSRFSGSGSGTDYSLTISNLEQEDIATYFCQQGNTLPYTFGGGTKLEITRADAAPTVSIFPPSSN

SEQ ID NO: 33 - protein, 120 aa, synthetic construct
EVKLQESGPGLVAPSQSLSVTCTVSGVSLPDYGVSWIRQPPRKGLEWLGVIWGSETTYYNSALKSRLTIIKDNSKSQVFLKMNSLQTDDTAIYYCAKHYYYGGSYAMDYWGQGTSVTVSS

SEQ ID NO: 34 - protein, 634 aa, synthetic construct
MLLLVTSLLLCELPHPAFLLIPDIQMTQTTSSLSASLGDRVTISCRASQDISKYLNWYQQKPDGTVKLLIYHTSRLHSGVPSRFSGSGSGTDYSLTISNLEQEDIATYFCQQGNTLPYTFGGGTKLEITGSTSGSGKPGSGEGSTKGEVKLQESGPGLVAPSQSLSVTCTVSGVSLPDYGVSWIRQPPRKGLEWLGVIWGSETTYYNSALKSRLTIIKDNSKSQVFLKMNSLQTDDTAIYYCAKHYYYGGSYAMDYWGQGTSVTVSSVEPKSSDKTHTCPPCPAPELLGGPSVFLFPPKPKDTLMISRTPEVTCVVVDVSHEDPEVKFNWYVDGVEVHNAKTKPREEQYNSTYRVVSVLTVLHQDWLNGKEYKCKVSNKALPAPIEKTISKAKGQPREPQVYTLPPSRDELTKNQVSLTCLVKGFYPSDIAVEWESNGQPENNYKTTPPVLDSDGSFFLYSKLTVDKSRWQQGNVFSCSVMHEALHNHYTQKSLSLSPGKMALIVLGGVAGLLLFIGLGIFFRVKFSRSADAPAYQQGQNQLYNELNLGRREEYDVLDKRRGRDPEMGGKPRRKNPQEGLYNELQKDKMAEAYSEIGMKGERRRGKGHDGLYQGLSTATKDTYDALHMQALPPR

SEQ ID NO: 35 - protein, 120 aa, synthetic construct
EVQLVESGGGLVQPGGSLRLSCAASGVSLPDYGVSWVRQAPGKGLEWVSVIWGSETTYYNSALKSRFTISRDNAKNSLYLQMNSLRAEDTAVYYCAKHYYYGGSYAMDYWGQGTLVTVSS

SEQ ID NO: 36 - protein, 107 aa, synthetic construct
DIQMTQSPSSLSASVGDRVTITCRASQDISKYLNWYQQKPGKAPKLLIYHTSRLHSGVPSRFSGSGSGTDFTLTISSLQPEDFATYYCQQGNTLPYTFGQGTKVEIK

SEQ ID NO: 37 - protein, 11 aa, synthetic construct
RASQDISKYLN

SEQ ID NO: 38 - protein, 7 aa, synthetic construct
HTSRLHS

SEQ ID NO: 39 - protein, 9 aa, synthetic construct
QQGNTLPYT

SEQ ID NO: 40 - protein, 10 aa, synthetic construct
GVSLPDYGVS

SEQ ID NO: 41 - protein, 16 aa, synthetic construct
VIWGSETTYYSSSLKS

SEQ ID NO: 42 - protein, 16 aa, synthetic construct
VIWGSETTYYQSSLKS

SEQ ID NO: 43 - protein, 16 aa, synthetic construct
VIWGSETTYYNSSLKS

SEQ ID NO: 44 - protein, 12 aa, synthetic construct
HYYYGGSYAMDY

SEQ ID NO: 45 - protein, 107 aa, synthetic construct
DIQMTQSPSSLSASVGDRVTITCRASQDISKYLNWYQQKPDQAPKLLIKHTSRLHSGVPSRFSGSGSGTDYTLTISSLQPEDFATYYCQQGNTLPYTFGQGTKLEIK

SEQ ID NO: 46 - protein, 107 aa, synthetic construct
DIQMTQSPSSLSASVGDRVTITCRASQDISKYLNWYQQKPGKAVKLLIYHTSRLHSGVPSRFSGSGSGTDYTLTISSLQPEDIATYFCQQGNTLPYTFGGGTKLEIK

SEQ ID NO: 47 - protein, 107 aa, synthetic construct
DIQMTQSPSFLSASVGDRVTITCRASQDISKYLNWYQQKPDQAPKLLIKHTSRLHSGVPSRFSGSGSGTDFTFTISSLQPEDIATYYCQQGNTLPYTFGQGTKLEIK

SEQ ID NO: 48 - protein, 107 aa, synthetic construct
DIQMTQSPSTLSASVGDRVTITCRASQDISKYLNWYQQKPDQAPKLLIKHTSRLHSGVPSRFSGSGSGTDFTFTISSLQPEDIATYYCQQGNTLPYTFGQGTKLEIK

SEQ ID NO: 49 - protein, 120 aa, synthetic construct
EVQLVESGGGLVQPGRSLRLSCTASGVSLPDYGVSWIRQPPGKGLEWIGVIWGSETTYYNSALKSRFTISRDNSKNTLYLQMNSLRAEDTAVYYCAKHYYYGGSYAMDYWGQGTLVTVSS

SEQ ID NO: 50 - protein, 120 aa, synthetic construct
QVQLQESGPGLVKPSETLSVTCTVSGVSLPDYGVSWIRQPPGKGLEWLGVIWGSETTYYNSALKSRLTISKDTSKNQVFLKMSSLTAADTAIYYCAKHYYYGGSYAMDYWGQGTLVTVSS

SEQ ID NO: 51 - protein, 120 aa, synthetic construct
EVQLVESGGGLVQPGRSLRLSCTASGVSLPDYGVSWVRQPPGKGLEWIGVIWGSETTYYNSALKSRFTISRDNSKNTLYLQMNSLRAEDTAVYYCAKHYYYGGSYAMDYWGQGTLVTVSS

SEQ ID NO: 52 - protein, 120 aa, synthetic construct
QVQLQESGPGLVKPSGTLSLTCAVSGVSLPDYGVSWIRQPPGKGLEWIGVIWGSETTYYNSALKSRVTISRDNSKNTLYLQMNSLRAEDTAVYYCAKHYYYGGSYAMDYWGQGTLVTVSS

SEQ ID NO: 53 - protein, 8 aa, synthetic construct
RASQDISK

SEQ ID NO: 54 - protein, 7 aa, synthetic construct
IYHTSRL

SEQ ID NO: 55 - protein, 9 aa, synthetic construct
QQGNTLPYT

SEQ ID NO: 56 - protein, 10 aa, synthetic construct
GVSLPDYGVS

SEQ ID NO: 57 - protein, 14 aa, synthetic construct
VIWGSETTYYNSAL

SEQ ID NO: 58 - protein, 12 aa, synthetic construct
HYYYGGSYAMDY

SEQ ID NO: 59 - DNA, 2210 bp, synthetic construct
  source 1..2210: mol_type = other DNA
ggatccgaattcgccgccaccatggccttaccagtgaccgccttgctcctgccgctggccttgctgctccacgccgccaggccggactacaaagacgatgacgataaaggcggtggtggctctggtggtggcggcagcgacatccagatgacacagactacatcctccctgtctgcctctctgggagacagagtcaccatcagttgcagggcaagtcaggacattagtaaatatttaaattggtatcagcagaaaccagatggaactgttaaactcctgatctaccatacatcaagattacactcaggagtcccatcaaggttcagtggcagtgggtctggaacagattattctctcaccattagcaacctggagcaagaagatattgccacttacttttgccaacagggtaatacgcttccgtacacgttcggaggggggaccaagctggagatcacaggtggcggtggctcgggcggtggtgggtcgggtggcggcggatctgaggtgaaactgcaggagtcaggacctggcctggtggcgccctcacagagcctgtccgtcacatgcactgtctcaggggtctcattacccgactatggtgtaagctggattcgccagcctccacgaaagggtctggagtggctgggagtaatatggggtagtgaaaccacatactataattcagctctcaaatccagactgaccatcatcaaggacaactccaagagccaagttttcttaaaaatgaacagtctgcaaactgatgacacagccatttactactgtgccaaacattattactacggtggtagctatgctatggactactggggccaaggaacctcagtcaccgtctcctcaaccacgacgccagcgccgcgaccaccaacaccggcgcccaccatcgcgtcgcagcccctgtccctgcgcccagaggcgtgccggccagcggcggggggcgcagtgcacacgagggggctggacttcgcctgtgatatctacatctgggcgcccttggccgggacttgtggggtccttctcctgtcactggttatcaccctttactgccggagggaccagaggctgccccccgatgcccacaagccccctgggggaggcagtttccggacccccatccaagaggagcaggccgacgcccactccaccctggccaagatcagagtgaagttcagcaggagcgcagacgcccccgcgtaccagcagggccagaaccagctctataacgagctcaatctaggacgaagagaggagtacgatgttttggacaagagacgtggccgggaccctgagatggggggaaagccgagaaggaagaaccctcaggaaggcctgtacaatgaactgcagaaagataagatggcggaggcctacagtgagattgggatgaaaggcgagcgccggaggggcaaggggcacgatggcctttaccagggtctcagtacagccaccaaggacacctacgacgcccttcacatgcaggccctgccccctcgcggctctggcgagggaaggggttccctgcttacttgcggcgacgtcgaagagaatcccggtccgatggccctcccagtaactgccctccttttgcccctcgcactccttcttcatgccgctcgccccaactgggtcaacgtgattagcgatttgaagaaaatcgaggaccttatacagtctatgcatattgacgctacactgtatactgagagtgatgtacacccgtcctgtaaggtaacggccatgaaatgctttcttctggagctccaggtcatcagcttggagtctggggacgcaagcatccacgatacggttgaaaacctcatcatccttgcgaacaactctctctcatctaatggaaacgttacagagagtgggtgtaaggagtgcgaagagttggaagaaaaaaacatcaaagaatttcttcaatccttcgttcacatagtgcaaatgttcattaacacgtccactaccacacccgccccgaggccacctacgccggcaccgactatcgccagtcaacccctctctctgcgccccgaggcttgccggcctgcggctggtggggcggtccacacccggggcctggattttgcgtgcgatatatacatctgggcacctcttgccggcacctgcggagtgctgcttctctcactcgttattacgctgtactgctaagcggccgcgtcgac

SEQ ID NO: 60 - protein, 724 aa, synthetic construct
MALPVTALLLPLALLLHAARPDYKDDDDKGGGGSGGGGSDIQMTQTTSSLSASLGDRVTISCRASQDISKYLNWYQQKPDGTVKLLIYHTSRLHSGVPSRFSGSGSGTDYSLTISNLEQEDIATYFCQQGNTLPYTFGGGTKLEITGGGGSGGGGSGGGGSEVKLQESGPGLVAPSQSLSVTCTVSGVSLPDYGVSWIRQPPRKGLEWLGVIWGSETTYYNSALKSRLTIIKDNSKSQVFLKMNSLQTDDTAIYYCAKHYYYGGSYAMDYWGQGTSVTVSSTTTPAPRPPTPAPTIASQPLSLRPEACRPAAGGAVHTRGLDFACDIYIWAPLAGTCGVLLLSLVITLYCRRDQRLPPDAHKPPGGGSFRTPIQEEQADAHSTLAKIRVKFSRSADAPAYQQGQNQLYNELNLGRREEYDVLDKRRGRDPEMGGKPRRKNPQEGLYNELQKDKMAEAYSEIGMKGERRRGKGHDGLYQGLSTATKDTYDALHMQALPPRGSGEGRGSLLTCGDVEENPGPMALPVTALLLPLALLLHAARPNWVNVISDLKKIEDLIQSMHIDATLYTESDVHPSCKVTAMKCFLLELQVISLESGDASIHDTVENLIILANNSLSSNGNVTESGCKECEELEEKNIKEFLQSFVHIVQMFINTSTTTPAPRPPTPAPTIASQPLSLRPEACRPAAGGAVHTRGLDFACDIYIWAPLAGTCGVLLLSLVITLYC

SEQ ID NO: 61 - DNA, 2231 bp, synthetic construct
  source 1..2231: mol_type = other DNA
ggatccgaattcgccgccaccatggccttaccagtgaccgccttgctcctgccgctggccttgctgctccacgccgccaggccggactacaaagacgatgacgataaaggcggtggtggctctggtggtggcggcagcgacatccagatgacacagactacatcctccctgtctgcctctctgggagacagagtcaccatcagttgcagggcaagtcaggacattagtaaatatttaaattggtatcagcagaaaccagatggaactgttaaactcctgatctaccatacatcaagattacactcaggagtcccatcaaggttcagtggcagtgggtctggaacagattattctctcaccattagcaacctggagcaagaagatattgccacttacttttgccaacagggtaatacgcttccgtacacgttcggaggggggaccaagctggagatcacaggtggcggtggctcgggcggtggtgggtcgggtggcggcggatctgaggtgaaactgcaggagtcaggacctggcctggtggcgccctcacagagcctgtccgtcacatgcactgtctcaggggtctcattacccgactatggtgtaagctggattcgccagcctccacgaaagggtctggagtggctgggagtaatatggggtagtgaaaccacatactataattcagctctcaaatccagactgaccatcatcaaggacaactccaagagccaagttttcttaaaaatgaacagtctgcaaactgatgacacagccatttactactgtgccaaacattattactacggtggtagctatgctatggactactggggccaaggaacctcagtcaccgtctcctcaaccacgacgccagcgccgcgaccaccaacaccggcgcccaccatcgcgtcgcagcccctgtccctgcgcccagaggcgtgccggccagcggcggggggcgcagtgcacacgagggggctggacttcgcctgtgatttttgggtgctggtggtggttggtggagtcctggcttgctatagcttgctagtaacagtggcctttattattttctgggtgaggagtaagaggagcaggctcctgcacagtgactacatgaacatgactccccgccgccccgggcccacccgcaagcattaccagccctatgccccaccacgcgacttcgcagcctatcgctccagagtgaagttcagcaggagcgcagacgcccccgcgtaccagcagggccagaaccagctctataacgagctcaatctaggacgaagagaggagtacgatgttttggacaagagacgtggccgggaccctgagatggggggaaagccgagaaggaagaaccctcaggaaggcctgtacaatgaactgcagaaagataagatggcggaggcctacagtgagattgggatgaaaggcgagcgccggaggggcaaggggcacgatggcctttaccagggtctcagtacagccaccaaggacacctacgacgcccttcacatgcaggccctgccccctcgcggctctggcgagggaaggggttccctgcttacttgcggcgacgtcgaagagaatcccggtccgatggccctcccagtaactgccctccttttgcccctcgcactccttcttcatgccgctcgccccaactgggtcaacgtgattagcgatttgaagaaaatcgaggaccttatacagtctatgcatattgacgctacactgtatactgagagtgatgtacacccgtcctgtaaggtaacggccatgaaatgctttcttctggagctccaggtcatcagcttggagtctggggacgcaagcatccacgatacggttgaaaacctcatcatccttgcgaacaactctctctcatctaatggaaacgttacagagagtgggtgtaaggagtgcgaagagttggaagaaaaaaacatcaaagaatttcttcaatccttcgttcacatagtgcaaatgttcattaacacgtccactaccacacccgccccgaggccacctacgccggcaccgactatcgccagtcaacccctctctctgcgccccgaggcttgccggcctgcggctggtggggcggtccacacccggggcctggattttgcgtgcgatatatacatctgggcacctcttgccggcacctgcggagtgctgcttctctcactcgttattacgctgtactgctaagcggccgcgtcgac

SEQ ID NO: 62 - protein, 731 aa, synthetic construct
MALPVTALLLPLALLLHAARPDYKDDDDKGGGGSGGGGSDIQMTQTTSSLSASLGDRVTISCRASQDISKYLNWYQQKPDGTVKLLIYHTSRLHSGVPSRFSGSGSGTDYSLTISNLEQEDIATYFCQQGNTLPYTFGGGTKLEITGGGGSGGGGSGGGGSEVKLQESGPGLVAPSQSLSVTCTVSGVSLPDYGVSWIRQPPRKGLEWLGVIWGSETTYYNSALKSRLTIIKDNSKSQVFLKMNSLQTDDTAIYYCAKHYYYGGSYAMDYWGQGTSVTVSSTTTPAPRPPTPAPTIASQPLSLRPEACRPAAGGAVHTRGLDFACDFWVLVVVGGVLACYSLLVTVAFIIFWVRSKRSRLLHSDYMNMTPRRPGPTRKHYQPYAPPRDFAAYRSRVKFSRSADAPAYQQGQNQLYNELNLGRREEYDVLDKRRGRDPEMGGKPRRKNPQEGLYNELQKDKMAEAYSEIGMKGERRRGKGHDGLYQGLSTATKDTYDALHMQALPPRGSGEGRGSLLTCGDVEENPGPMALPVTALLLPLALLLHAARPNWVNVISDLKKIEDLIQSMHIDATLYTESDVHPSCKVTAMKCFLLELQVISLESGDASIHDTVENLIILANNSLSSNGNVTESGCKECEELEEKNIKEFLQSFVHIVQMFINTSTTTPAPRPPTPAPTIASQPLSLRPEACRPAAGGAVHTRGLDFACDIYIWAPLAGTCGVLLLSLVITLYC

SEQ ID NO: 63 - DNA, 2213 bp, synthetic construct
  source 1..2213: mol_type = other DNA
ggatccgaattcgccgccaccatggccttaccagtgaccgccttgctcctgccgctggccttgctgctccacgccgccaggccggactacaaagacgatgacgataaaggcggtggtggctctggtggtggcggcagcgacatccagatgacacagactacatcctccctgtctgcctctctgggagacagagtcaccatcagttgcagggcaagtcaggacattagtaaatatttaaattggtatcagcagaaaccagatggaactgttaaactcctgatctaccatacatcaagattacactcaggagtcccatcaaggttcagtggcagtgggtctggaacagattattctctcaccattagcaacctggagcaagaagatattgccacttacttttgccaacagggtaatacgcttccgtacacgttcggaggggggaccaagctggagatcacaggtggcggtggctcgggcggtggtgggtcgggtggcggcggatctgaggtgaaactgcaggagtcaggacctggcctggtggcgccctcacagagcctgtccgtcacatgcactgtctcaggggtctcattacccgactatggtgtaagctggattcgccagcctccacgaaagggtctggagtggctgggagtaatatggggtagtgaaaccacatactataattcagctctcaaatccagactgaccatcatcaaggacaactccaagagccaagttttcttaaaaatgaacagtctgcaaactgatgacacagccatttactactgtgccaaacattattactacggtggtagctatgctatggactactggggccaaggaacctcagtcaccgtctcctcaaccacgacgccagcgccgcgaccaccaacaccggcgcccaccatcgcgtcgcagcccctgtccctgcgcccagaggcgtgccggccagcggcggggggcgcagtgcacacgagggggctggacttcgcctgtgatatctacatctgggcgcccttggccgggacttgtggggtccttctcctgtcactggttatcaccctttactgctgttggcttacaaaaaagaagtattcatccagtgtgcacgaccctaacggtgaatacatgttcatgagagcagtgaacacagccaaaaaatctagactcacagatgtgaccctaagagtgaagttcagcaggagcgcagacgcccccgcgtaccagcagggccagaaccagctctataacgagctcaatctaggacgaagagaggagtacgatgttttggacaagagacgtggccgggaccctgagatggggggaaagccgagaaggaagaaccctcaggaaggcctgtacaatgaactgcagaaagataagatggcggaggcctacagtgagattgggatgaaaggcgagcgccggaggggcaaggggcacgatggcctttaccagggtctcagtacagccaccaaggacacctacgacgcccttcacatgcaggccctgccccctcgcggctctggcgagggaaggggttccctgcttacttgcggcgacgtcgaagagaatcccggtccgatggccctcccagtaactgccctccttttgcccctcgcactccttcttcatgccgctcgccccaactgggtcaacgtgattagcgatttgaagaaaatcgaggaccttatacagtctatgcatattgacgctacactgtatactgagagtgatgtacacccgtcctgtaaggtaacggccatgaaatgctttcttctggagctccaggtcatcagcttggagtctggggacgcaagcatccacgatacggttgaaaacctcatcatccttgcgaacaactctctctcatctaatggaaacgttacagagagtgggtgtaaggagtgcgaagagttggaagaaaaaaacatcaaagaatttcttcaatccttcgttcacatagtgcaaatgttcattaacacgtccactaccacacccgccccgaggccacctacgccggcaccgactatcgccagtcaacccctctctctgcgccccgaggcttgccggcctgcggctggtggggcggtccacacccggggcctggattttgcgtgcgatatatacatctgggcacctcttgccggcacctgcggagtgctgcttctctcactcgttattacgctgtactgctaagcggccgcgtcgac

SEQ ID NO: 64 - protein, 725 aa, synthetic construct
MALPVTALLLPLALLLHAARPDYKDDDDKGGGGSGGGGSDIQMTQTTSSLSASLGDRVTISCRASQDISKYLNWYQQKPDGTVKLLIYHTSRLHSGVPSRFSGSGSGTDYSLTISNLEQEDIATYFCQQGNTLPYTFGGGTKLEITGGGGSGGGGSGGGGSEVKLQESGPGLVAPSQSLSVTCTVSGVSLPDYGVSWIRQPPRKGLEWLGVIWGSETTYYNSALKSRLTIIKDNSKSQVFLKMNSLQTDDTAIYYCAKHYYYGGSYAMDYWGQGTSVTVSSTTTPAPRPPTPAPTIASQPLSLRPEACRPAAGGAVHTRGLDFACDIYIWAPLAGTCGVLLLSLVITLYCCWLTKKKYSSSVHDPNGEYMFMRAVNTAKKSRLTDVTLRVKFSRSADAPAYQQGQNQLYNELNLGRREEYDVLDKRRGRDPEMGGKPRRKNPQEGLYNELQKDKMAEAYSEIGMKGERRRGKGHDGLYQGLSTATKDTYDALHMQALPPRGSGEGRGSLLTCGDVEENPGPMALPVTALLLPLALLLHAARPNWVNVISDLKKIEDLIQSMHIDATLYTESDVHPSCKVTAMKCFLLELQVISLESGDASIHDTVENLIILANNSLSSNGNVTESGCKECEELEEKNIKEFLQSFVHIVQMFINTSTTTPAPRPPTPAPTIASQPLSLRPEACRPAAGGAVHTRGLDFACDIYIWAPLAGTCGVLLLSLVITLYC

SEQ ID NO: 65 - DNA, 2357 bp, synthetic construct
  source 1..2357: mol_type = other DNA
ggatccgaattcgccgccaccatggccttaccagtgaccgccttgctcctgccgctggccttgctgctccacgccgccaggccggactacaaagacgatgacgataaaggcggtggtggctctggtggtggcggcagcgacatccagatgacacagactacatcctccctgtctgcctctctgggagacagagtcaccatcagttgcagggcaagtcaggacattagtaaatatttaaattggtatcagcagaaaccagatggaactgttaaactcctgatctaccatacatcaagattacactcaggagtcccatcaaggttcagtggcagtgggtctggaacagattattctctcaccattagcaacctggagcaagaagatattgccacttacttttgccaacagggtaatacgcttccgtacacgttcggaggggggaccaagctggagatcacaggtggcggtggctcgggcggtggtgggtcgggtggcggcggatctgaggtgaaactgcaggagtcaggacctggcctggtggcgccctcacagagcctgtccgtcacatgcactgtctcaggggtctcattacccgactatggtgtaagctggattcgccagcctccacgaaagggtctggagtggctgggagtaatatggggtagtgaaaccacatactataattcagctctcaaatccagactgaccatcatcaaggacaactccaagagccaagttttcttaaaaatgaacagtctgcaaactgatgacacagccatttactactgtgccaaacattattactacggtggtagctatgctatggactactggggccaaggaacctcagtcaccgtctcctcaaccacgacgccagcgccgcgaccaccaacaccggcgcccaccatcgcgtcgcagcccctgtccctgcgcccagaggcgtgccggccagcggcggggggcgcagtgcacacgagggggctggacttcgcctgtgatttttgggtgctggtggtggttggtggagtcctggcttgctatagcttgctagtaacagtggcctttattattttctgggtgaggagtaagaggagcaggctcctgcacagtgactacatgaacatgactccccgccgccccgggcccacccgcaagcattaccagccctatgccccaccacgcgacttcgcagcctatcgctccaaacggggcagaaagaaactcctgtatatattcaaacaaccatttatgagaccagtacaaactactcaagaggaagatggctgtagctgccgatttccagaagaagaagaaggaggatgtgaactgagagtgaagttcagcaggagcgcagacgcccccgcgtaccagcagggccagaaccagctctataacgagctcaatctaggacgaagagaggagtacgatgttttggacaagagacgtggccgggaccctgagatggggggaaagccgagaaggaagaaccctcaggaaggcctgtacaatgaactgcagaaagataagatggcggaggcctacagtgagattgggatgaaaggcgagcgccggaggggcaaggggcacgatggcctttaccagggtctcagtacagccaccaaggacacctacgacgcccttcacatgcaggccctgccccctcgcggctctggcgagggaaggggttccctgcttacttgcggcgacgtcgaagagaatcccggtccgatggccctcccagtaactgccctccttttgcccctcgcactccttcttcatgccgctcgccccaactgggtcaacgtgattagcgatttgaagaaaatcgaggaccttatacagtctatgcatattgacgctacactgtatactgagagtgatgtacacccgtcctgtaaggtaacggccatgaaatgctttcttctggagctccaggtcatcagcttggagtctggggacgcaagcatccacgatacggttgaaaacctcatcatccttgcgaacaactctctctcatctaatggaaacgttacagagagtgggtgtaaggagtgcgaagagttggaagaaaaaaacatcaaagaatttcttcaatccttcgttcacatagtgcaaatgttcattaacacgtccactaccacacccgccccgaggccacctacgccggcaccgactatcgccagtcaacccctctctctgcgccccgaggcttgccggcctgcggctggtggggcggtccacacccggggcctggattttgcgtgcgatatatacatctgggcacctcttgccggcacctgcggagtgctgcttctctcactcgttattacgctgtactgctaagcggccgcgtcgac

SEQ ID NO: 66 - protein, 773 aa, synthetic construct
MALPVTALLLPLALLLHAARPDYKDDDDKGGGGSGGGGSDIQMTQTTSSLSASLGDRVTISCRASQDISKYLNWYQQKPDGTVKLLIYHTSRLHSGVPSRFSGSGSGTDYSLTISNLEQEDIATYFCQQGNTLPYTFGGGTKLEITGGGGSGGGGSGGGGSEVKLQESGPGLVAPSQSLSVTCTVSGVSLPDYGVSWIRQPPRKGLEWLGVIWGSETTYYNSALKSRLTIIKDNSKSQVFLKMNSLQTDDTAIYYCAKHYYYGGSYAMDYWGQGTSVTVSSTTTPAPRPPTPAPTIASQPLSLRPEACRPAAGGAVHTRGLDFACDFWVLVVVGGVLACYSLLVTVAFIIFWVRSKRSRLLHSDYMNMTPRRPGPTRKHYQPYAPPRDFAAYRSKRGRKKLLYIFKQPFMRPVQTTQEEDGCSCRFPEEEEGGCELRVKFSRSADAPAYQQGQNQLYNELNLGRREEYDVLDKRRGRDPEMGGKPRRKNPQEGLYNELQKDKMAEAYSEIGMKGERRRGKGHDGLYQGLSTATKDTYDALHMQALPPRGSGEGRGSLLTCGDVEENPGPMALPVTALLLPLALLLHAARPNWVNVISDLKKIEDLIQSMHIDATLYTESDVHPSCKVTAMKCFLLELQVISLESGDASIHDTVENLIILANNSLSSNGNVTESGCKECEELEEKNIKEFLQSFVHIVQMFINTSTTTPAPRPPTPAPTIASQPLSLRPEACRPAAGGAVHTRGLDFACDIYIWAPLAGTCGVLLLSLVITLYC

SEQ ID NO: 67 - DNA, 2201 bp, synthetic construct
  source 1..2201: mol_type = other DNA
ggatccgaattcgccgccaccatggccttaccagtgaccgccttgctcctgccgctggccttgctgctccacgccgccaggccggactacaaagacgatgacgataaaggcggtggtggctctggtggtggcggcagcgacatccagatgacacagactacatcctccctgtctgcctctctgggagacagagtcaccatcagttgcagggcaagtcaggacattagtaaatatttaaattggtatcagcagaaaccagatggaactgttaaactcctgatctaccatacatcaagattacactcaggagtcccatcaaggttcagtggcagtgggtctggaacagattattctctcaccattagcaacctggagcaagaagatattgccacttacttttgccaacagggtaatacgcttccgtacacgttcggaggggggaccaagctggagatcacaggtggcggtggctcgggcggtggtgggtcgggtggcggcggatctgaggtgaaactgcaggagtcaggacctggcctggtggcgccctcacagagcctgtccgtcacatgcactgtctcaggggtctcattacccgactatggtgtaagctggattcgccagcctccacgaaagggtctggagtggctgggagtaatatggggtagtgaaaccacatactataattcagctctcaaatccagactgaccatcatcaaggacaactccaagagccaagttttcttaaaaatgaacagtctgcaaactgatgacacagccatttactactgtgccaaacattattactacggtggtagctatgctatggactactggggccaaggaacctcagtcaccgtctcctcaaccacgacgccagcgccgcgaccaccaacaccggcgcccaccatcgcgtcgcagcccctgtccctgcgcccagaggcgtgccggccagcggcggggggcgcagtgcacacgagggggctggacttcgcctgtgatccattttttttctgctgcttcatcgctgtagccatgggaatccgtttcattattatggtaacacggagggaccagaggctgccccccgatgcccacaagccccctgggggaggcagtttccggacccccatccaagaggagcaggccgacgcccactccaccctggccaagatcagagtgaagttcagcaggagcgcagacgcccccgcgtaccagcagggccagaaccagctctataacgagctcaatctaggacgaagagaggagtacgatgttttggacaagagacgtggccgggaccctgagatggggggaaagccgagaaggaagaaccctcaggaaggcctgtacaatgaactgcagaaagataagatggcggaggcctacagtgagattgggatgaaaggcgagcgccggaggggcaaggggcacgatggcctttaccagggtctcagtacagccaccaaggacacctacgacgcccttcacatgcaggccctgccccctcgcggctctggcgagggaaggggttccctgcttacttgcggcgacgtcgaagagaatcccggtccgatggccctcccagtaactgccctccttttgcccctcgcactccttcttcatgccgctcgccccaactgggtcaacgtgattagcgatttgaagaaaatcgaggaccttatacagtctatgcatattgacgctacactgtatactgagagtgatgtacacccgtcctgtaaggtaacggccatgaaatgctttcttctggagctccaggtcatcagcttggagtctggggacgcaagcatccacgatacggttgaaaacctcatcatccttgcgaacaactctctctcatctaatggaaacgttacagagagtgggtgtaaggagtgcgaagagttggaagaaaaaaacatcaaagaatttcttcaatccttcgttcacatagtgcaaatgttcattaacacgtccactaccacacccgccccgaggccacctacgccggcaccgactatcgccagtcaacccctctctctgcgccccgaggcttgccggcctgcggctggtggggcggtccacacccggggcctggattttgcgtgcgatatatacatctgggcacctcttgccggcacctgcggagtgctgcttctctcactcgttattacgctgtactgctaagcggccgcgtcgac

SEQ ID NO: 68 - protein, 721 aa, synthetic construct
MALPVTALLLPLALLLHAARPDYKDDDDKGGGGSGGGGSDIQMTQTTSSLSASLGDRVTISCRASQDISKYLNWYQQKPDGTVKLLIYHTSRLHSGVPSRFSGSGSGTDYSLTISNLEQEDIATYFCQQGNTLPYTFGGGTKLEITGGGGSGGGGSGGGGSEVKLQESGPGLVAPSQSLSVTCTVSGVSLPDYGVSWIRQPPRKGLEWLGVIWGSETTYYNSALKSRLTIIKDNSKSQVFLKMNSLQTDDTAIYYCAKHYYYGGSYAMDYWGQGTSVTVSSTTTPAPRPPTPAPTIASQPLSLRPEACRPAAGGAVHTRGLDFACDPFFFCCFIAVAMGIRFIIMVTRRDQRLPPDAHKPPGGGSFRTPIQEEQADAHSTLAKIRVKFSRSADAPAYQQGQNQLYNELNLGRREEYDVLDKRRGRDPEMGGKPRRKNPQEGLYNELQKDKMAEAYSEIGMKGERRRGKGHDGLYQGLSTATKDTYDALHMQALPPRGSGEGRGSLLTCGDVEENPGPMALPVTALLLPLALLLHAARPNWVNVISDLKKIEDLIQSMHIDATLYTESDVHPSCKVTAMKCFLLELQVISLESGDASIHDTVENLIILANNSLSSNGNVTESGCKECEELEEKNIKEFLQSFVHIVQMFINTSTTTPAPRPPTPAPTIASQPLSLRPEACRPAAGGAVHTRGLDFACDIYIWAPLAGTCGVLLLSLVITLYC

SEQ ID NO: 69 - DNA, 1805 bp, synthetic construct
  source 1..1805: mol_type = other DNA
ggatccgaattcgccgccaccatggccttaccagtgaccgccttgctcctgccgctggccttgctgctccacgccgccaggccggactacaaagacgatgacgataaaggcggtggtggctctggtggtggcggcagcgacatccagatgacacagactacatcctccctgtctgcctctctgggagacagagtcaccatcagttgcagggcaagtcaggacattagtaaatatttaaattggtatcagcagaaaccagatggaactgttaaactcctgatctaccatacatcaagattacactcaggagtcccatcaaggttcagtggcagtgggtctggaacagattattctctcaccattagcaacctggagcaagaagatattgccacttacttttgccaacagggtaatacgcttccgtacacgttcggaggggggaccaagctggagatcacaaccacgacgccagcgccgcgaccaccaacaccggcgcccaccatcgcgtcgcagcccctgtccctgcgcccagaggcgtgccggccagcggcggggggcgcagtgcacacgagggggctggacttcgcctgtgatatctacatctgggcgcccttggccgggacttgtggggtccttctcctgtcactggttatcaccctttactgccggagggaccagaggctgccccccgatgcccacaagccccctgggggaggcagtttccggacccccatccaagaggagcaggccgacgcccactccaccctggccaagatcagagtgaagttcagcaggagcgcagacgcccccgcgtaccagcagggccagaaccagctctataacgagctcaatctaggacgaagagaggagtacgatgttttggacaagagacgtggccgggaccctgagatggggggaaagccgagaaggaagaaccctcaggaaggcctgtacaatgaactgcagaaagataagatggcggaggcctacagtgagattgggatgaaaggcgagcgccggaggggcaaggggcacgatggcctttaccagggtctcagtacagccaccaaggacacctacgacgcccttcacatgcaggccctgccccctcgcggctctggcgagggaaggggttccctgcttacttgcggcgacgtcgaagagaatcccggtccgatggccctcccagtaactgccctccttttgcccctcgcactccttcttcatgccgctcgccccaactgggtcaacgtgattagcgatttgaagaaaatcgaggaccttatacagtctatgcatattgacgctacactgtatactgagagtgatgtacacccgtcctgtaaggtaacggccatgaaatgctttcttctggagctccaggtcatcagcttggagtctggggacgcaagcatccacgatacggttgaaaacctcatcatccttgcgaacaactctctctcatctaatggaaacgttacagagagtgggtgtaaggagtgcgaagagttggaagaaaaaaacatcaaagaatttcttcaatccttcgttcacatagtgcaaatgttcattaacacgtccactaccacacccgccccgaggccacctacgccggcaccgactatcgccagtcaacccctctctctgcgccccgaggcttgccggcctgcggctggtggggcggtccacacccggggcctggattttgcgtgcgatatatacatctgggcacctcttgccggcacctgcggagtgctgcttctctcactcgttattacgctgtactgctaagcggccgcgtcgac

SEQ ID NO: 70 - protein, 589 aa, synthetic construct
MALPVTALLLPLALLLHAARPDYKDDDDKGGGGSGGGGSDIQMTQTTSSLSASLGDRVTISCRASQDISKYLNWYQQKPDGTVKLLIYHTSRLHSGVPSRFSGSGSGTDYSLTISNLEQEDIATYFCQQGNTLPYTFGGGTKLEITTTTPAPRPPTPAPTIASQPLSLRPEACRPAAGGAVHTRGLDFACDIYIWAPLAGTCGVLLLSLVITLYCRRDQRLPPDAHKPPGGGSFRTPIQEEQADAHSTLAKIRVKFSRSADAPAYQQGQNQLYNELNLGRREEYDVLDKRRGRDPEMGGKPRRKNPQEGLYNELQKDKMAEAYSEIGMKGERRRGKGHDGLYQGLSTATKDTYDALHMQALPPRGSGEGRGSLLTCGDVEENPGPMALPVTALLLPLALLLHAARPNWVNVISDLKKIEDLIQSMHIDATLYTESDVHPSCKVTAMKCFLLELQVISLESGDASIHDTVENLIILANNSLSSNGNVTESGCKECEELEEKNIKEFLQSFVHIVQMFINTSTTTPAPRPPTPAPTIASQPLSLRPEACRPAAGGAVHTRGLDFACDIYIWAPLAGTCGVLLLSLVITLYC

SEQ ID NO: 71 - DNA, 3347 bp, synthetic construct
  source 1..3347: mol_type = other DNA
ggatccgaattcgccgccaccatggccttaccagtgaccgccttgctcctgccgctggccttgctgctccacgccgccaggccggactacaaagacgatgacgataaaggcggtggtggctctggtggtggcggcagcgacatccagatgacacagactacatcctccctgtctgcctctctgggagacagagtcaccatcagttgcagggcaagtcaggacattagtaaatatttaaattggtatcagcagaaaccagatggaactgttaaactcctgatctaccatacatcaagattacactcaggagtcccatcaaggttcagtggcagtgggtctggaacagattattctctcaccattagcaacctggagcaagaagatattgccacttacttttgccaacagggtaatacgcttccgtacacgttcggaggggggaccaagctggagatcacaggtggcggtggctcgggcggtggtgggtcgggtggcggcggatctgaggtgaaactgcaggagtcaggacctggcctggtggcgccctcacagagcctgtccgtcacatgcactgtctcaggggtctcattacccgactatggtgtaagctggattcgccagcctccacgaaagggtctggagtggctgggagtaatatggggtagtgaaaccacatactataattcagctctcaaatccagactgaccatcatcaaggacaactccaagagccaagttttcttaaaaatgaacagtctgcaaactgatgacacagccatttactactgtgccaaacattattactacggtggtagctatgctatggactactggggccaaggaacctcagtcaccgtctcctcaaccacgacgccagcgccgcgaccaccaacaccggcgcccaccatcgcgtcgcagcccctgtccctgcgcccagaggcgtgccggccagcggcggggggcgcagtgcacacgagggggctggacttcgcctgtgatatctacatctgggcgcccttggccgggacttgtggggtccttctcctgtcactggttatcaccctttactgccggagggaccagaggctgccccccgatgcccacaagccccctgggggaggcagtttccggacccccatccaagaggagcaggccgacgcccactccaccctggccaagatcagagtgaagttcagcaggagcgcagacgcccccgcgtaccagcagggccagaaccagctctataacgagctcaatctaggacgaagagaggagtacgatgttttggacaagagacgtggccgggaccctgagatggggggaaagccgagaaggaagaaccctcaggaaggcctgtacaatgaactgcagaaagataagatggcggaggcctacagtgagattgggatgaaaggcgagcgccggaggggcaaggggcacgatggcctttaccagggtctcagtacagccaccaaggacacctacgacgcccttcacatgcaggccctgccccctcgcggctctggcgagggaaggggttccctgcttacttgcggcgacgtcgaagagaatcccggtccgatggccctcccagtaactgccctccttttgcccctcgcactccttcttcatgccgctcgccccaactgggtcaacgtgattagcgatttgaagaaaatcgaggaccttatacagtctatgcatattgacgctacactgtatactgagagtgatgtacacccgtcctgtaaggtaacggccatgaaatgctttcttctggagctccaggtcatcagcttggagtctggggacgcaagcatccacgatacggttgaaaacctcatcatccttgcgaacaactctctctcatctaatggaaacgttacagagagtgggtgtaaggagtgcgaagagttggaagaaaaaaacatcaaagaatttcttcaatccttcgttcacatagtgcaaatgttcattaacacgtccactaccacacccgccccgaggccacctacgccggcaccgactatcgccagtcaacccctctctctgcgccccgaggcttgccggcctgcggctggtggggcggtccacacccggggcctggattttgcgtgcgatatatacatctgggcacctcttgccggcacctgcggagtgctgcttctctcactcgttattacgctgtactgcggcagcggcgccacaaacttctctctgctaaagcaagcaggtgatgttgaagaaaaccccgggcctatgcttctcctggtgacaagccttctgctctgtgagttaccacacccagcattcctcctgatcccacgcaaagtgtgtaacggaataggtattggtgaatttaaagactcactctccataaatgctacgaatattaaacacttcaaaaactgcacctccatcagtggcgatctccacatcctgccggtggcatttaggggtgactccttcacacatactcctcctctggatccacaggaactggatattctgaaaaccgtaaaggaaatcacagggtttttgctgattcaggcttggcctgaaaacaggacggacctccatgcctttgagaacctagaaatcatacgcggcaggaccaagcaacatggtcagttttctcttgcagtcgtcagcctgaacataacatccttgggattacgctccctcaaggagataagtgatggagatgtgataatttcaggaaacaaaaatttgtgctatgcaaatacaataaactggaaaaaactgtttgggacctccggtcagaaaaccaaaattataagcaacagaggtgaaaacagctgcaaggccacaggccaggtctgccatgccttgtgctcccccgagggctgctggggcccggagcccagggactgcgtctcttgccggaatgtcagccgaggcagggaatgcgtggacaagtgcaaccttctggagggtgagccaagggagtttgtggagaactctgagtgcatacagtgccacccagagtgcctgcctcaggccatgaacatcacctgcacaggacggggaccagacaactgtatccagtgtgcccactacattgacggcccccactgcgtcaagacctgcccggcaggagtcatgggagaaaacaacaccctggtctggaagtacgcagacgccggccatgtgtgccacctgtgccatccaaactgcacctacggatgcactgggccaggtcttgaaggctgtccaacgaatgggcctaagatcccgtccatcgccactgggatggtgggggccctcctcttgctgctggtggtggccctggggatcggcctcttcatgtgagcggccgcgtcgac

SEQ ID NO: 72 - protein, 1103 aa, synthetic construct
MALPVTALLLPLALLLHAARPDYKDDDDKGGGGSGGGGSDIQMTQTTSSLSASLGDRVTISCRASQDISKYLNWYQQKPDGTVKLLIYHTSRLHSGVPSRFSGSGSGTDYSLTISNLEQEDIATYFCQQGNTLPYTFGGGTKLEITGGGGSGGGGSGGGGSEVKLQESGPGLVAPSQSLSVTCTVSGVSLPDYGVSWIRQPPRKGLEWLGVIWGSETTYYNSALKSRLTIIKDNSKSQVFLKMNSLQTDDTAIYYCAKHYYYGGSYAMDYWGQGTSVTVSSTTTPAPRPPTPAPTIASQPLSLRPEACRPAAGGAVHTRGLDFACDIYIWAPLAGTCGVLLLSLVITLYCRRDQRLPPDAHKPPGGGSFRTPIQEEQADAHSTLAKIRVKFSRSADAPAYQQGQNQLYNELNLGRREEYDVLDKRRGRDPEMGGKPRRKNPQEGLYNELQKDKMAEAYSEIGMKGERRRGKGHDGLYQGLSTATKDTYDALHMQALPPRGSGEGRGSLLTCGDVEENPGPMALPVTALLLPLALLLHAARPNWVNVISDLKKIEDLIQSMHIDATLYTESDVHPSCKVTAMKCFLLELQVISLESGDASIHDTVENLIILANNSLSSNGNVTESGCKECEELEEKNIKEFLQSFVHIVQMFINTSTTTPAPRPPTPAPTIASQPLSLRPEACRPAAGGAVHTRGLDFACDIYIWAPLAGTCGVLLLSLVITLYCGSGATNFSLLKQAGDVEENPGPMLLLVTSLLLCELPHPAFLLIPRKVCNGIGIGEFKDSLSINATNIKHFKNCTSISGDLHILPVAFRGDSFTHTPPLDPQELDILKTVKEITGFLLIQAWPENRTDLHAFENLEIIRGRTKQHGQFSLAVVSLNITSLGLRSLKEISDGDVIISGNKNLCYANTINWKKLFGTSGQKTKIISNRGENSCKATGQVCHALCSPEGCWGPEPRDCVSCRNVSRGRECVDKCNLLEGEPREFVENSECIQCHPECLPQAMNITCTGRGPDNCIQCAHYIDGPHCVKTCPAGVMGENNTLVWKYADAGHVCHLCHPNCTYGCTGPGLEGCPTNGPKIPSIATGMVGALLLLLVVALGIGLFM

SEQ ID NO: 73 - DNA, 1844 bp, synthetic construct
  source 1..1844: mol_type = other DNA
ggatccgaattcgccgccaccatggccttaccagtgaccgccttgctcctgccgctggccttgctgctccacgccgccaggccggactacaaagacgatgacgataaaggcggtggtggctctggtggtggcggcagcgaggtgaaactgcaggagtcaggacctggcctggtggcgccctcacagagcctgtccgtcacatgcactgtctcaggggtctcattacccgactatggtgtaagctggattcgccagcctccacgaaagggtctggagtggctgggagtaatatggggtagtgaaaccacatactataattcagctctcaaatccagactgaccatcatcaaggacaactccaagagccaagttttcttaaaaatgaacagtctgcaaactgatgacacagccatttactactgtgccaaacattattactacggtggtagctatgctatggactactggggccaaggaacctcagtcaccgtctcctcaaccacgacgccagcgccgcgaccaccaacaccggcgcccaccatcgcgtcgcagcccctgtccctgcgcccagaggcgtgccggccagcggcggggggcgcagtgcacacgagggggctggacttcgcctgtgatatctacatctgggcgcccttggccgggacttgtggggtccttctcctgtcactggttatcaccctttactgccggagggaccagaggctgccccccgatgcccacaagccccctgggggaggcagtttccggacccccatccaagaggagcaggccgacgcccactccaccctggccaagatcagagtgaagttcagcaggagcgcagacgcccccgcgtaccagcagggccagaaccagctctataacgagctcaatctaggacgaagagaggagtacgatgttttggacaagagacgtggccgggaccctgagatggggggaaagccgagaaggaagaaccctcaggaaggcctgtacaatgaactgcagaaagataagatggcggaggcctacagtgagattgggatgaaaggcgagcgccggaggggcaaggggcacgatggcctttaccagggtctcagtacagccaccaaggacacctacgacgcccttcacatgcaggccctgccccctcgcggctctggcgagggaaggggttccctgcttacttgcggcgacgtcgaagagaatcccggtccgatggccctcccagtaactgccctccttttgcccctcgcactccttcttcatgccgctcgccccaactgggtcaacgtgattagcgatttgaagaaaatcgaggaccttatacagtctatgcatattgacgctacactgtatactgagagtgatgtacacccgtcctgtaaggtaacggccatgaaatgctttcttctggagctccaggtcatcagcttggagtctggggacgcaagcatccacgatacggttgaaaacctcatcatccttgcgaacaactctctctcatctaatggaaacgttacagagagtgggtgtaaggagtgcgaagagttggaagaaaaaaacatcaaagaatttcttcaatccttcgttcacatagtgcaaatgttcattaacacgtccactaccacacccgccccgaggccacctacgccggcaccgactatcgccagtcaacccctctctctgcgccccgaggcttgccggcctgcggctggtggggcggtccacacccggggcctggattttgcgtgcgatatatacatctgggcacctcttgccggcacctgcggagtgctgcttctctcactcgttattacgctgtactgctaagcggccgcgtcgac

SEQ ID NO: 74 - protein, 602 aa, synthetic construct
MALPVTALLLPLALLLHAARPDYKDDDDKGGGGSGGGGSEVKLQESGPGLVAPSQSLSVTCTVSGVSLPDYGVSWIRQPPRKGLEWLGVIWGSETTYYNSALKSRLTIIKDNSKSQVFLKMNSLQTDDTAIYYCAKHYYYGGSYAMDYWGQGTSVTVSSTTTPAPRPPTPAPTIASQPLSLRPEACRPAAGGAVHTRGLDFACDIYIWAPLAGTCGVLLLSLVITLYCRRDQRLPPDAHKPPGGGSFRTPIQEEQADAHSTLAKIRVKFSRSADAPAYQQGQNQLYNELNLGRREEYDVLDKRRGRDPEMGGKPRRKNPQEGLYNELQKDKMAEAYSEIGMKGERRRGKGHDGLYQGLSTATKDTYDALHMQALPPRGSGEGRGSLLTCGDVEENPGPMALPVTALLLPLALLLHAARPNWVNVISDLKKIEDLIQSMHIDATLYTESDVHPSCKVTAMKCFLLELQVISLESGDASIHDTVENLIILANNSLSSNGNVTESGCKECEELEEKNIKEFLQSFVHIVQMFINTSTTTPAPRPPTPAPTIASQPLSLRPEACRPAAGGAVHTRGLDFACDIYIWAPLAGTCGVLLLSLVITLYC

SEQ ID NO: 75 - DNA, 2243 bp, synthetic construct
  source 1..2243: mol_type = other DNA
ggatccgaattcgccgccaccatggccttaccagtgaccgccttgctcctgccgctggccttgctgctccacgccgccaggccggactacaaagacgatgacgataaaggcggtggtggctctggtggtggcggcagcgacatccagatgacacagactacatcctccctgtctgcctctctgggagacagagtcaccatcagttgcagggcaagtcaggacattagtaaatatttaaattggtatcagcagaaaccagatggaactgttaaactcctgatctaccatacatcaagattacactcaggagtcccatcaaggttcagtggcagtgggtctggaacagattattctctcaccattagcaacctggagcaagaagatattgccacttacttttgccaacagggtaatacgcttccgtacacgttcggaggggggaccaagctggagatcacaggtggcggtggctcgggcggtggtgggtcgggtggcggcggatctgaggtgaaactgcaggagtcaggacctggcctggtggcgccctcacagagcctgtccgtcacatgcactgtctcaggggtctcattacccgactatggtgtaagctggattcgccagcctccacgaaagggtctggagtggctgggagtaatatggggtagtgaaaccacatactataattcagctctcaaatccagactgaccatcatcaaggacaactccaagagccaagttttcttaaaaatgaacagtctgcaaactgatgacacagccatttactactgtgccaaacattattactacggtggtagctatgctatggactactggggccaaggaacctcagtcaccgtctcctcaaccacgacgccagcgccgcgaccaccaacaccggcgcccaccatcgcgtcgcagcccctgtccctgcgcccagaggcgtgccggccagcggcggggggcgcagtgcacacgagggggctggacttcgcctgtgatatctacatctgggcgcccttggccgggacttgtggggtccttctcctgtcactggttatcaccctttactgccaacgaaggaaatatagatcaaacaaaggagaaagtcctgtggagcctgcagagccttgtcgttacagctgccccagggaggaggagggcagcaccatccccatccaggaggattaccgaaaaccggagcctgcctgctcccccagagtgaagttcagcaggagcgcagacgcccccgcgtaccagcagggccagaaccagctctataacgagctcaatctaggacgaagagaggagtacgatgttttggacaagagacgtggccgggaccctgagatggggggaaagccgagaaggaagaaccctcaggaaggcctgtacaatgaactgcagaaagataagatggcggaggcctacagtgagattgggatgaaaggcgagcgccggaggggcaaggggcacgatggcctttaccagggtctcagtacagccaccaaggacacctacgacgcccttcacatgcaggccctgccccctcgcggctctggcgagggaaggggttccctgcttacttgcggcgacgtcgaagagaatcccggtccgatggccctcccagtaactgccctccttttgcccctcgcactccttcttcatgccgctcgccccaactgggtcaacgtgattagcgatttgaagaaaatcgaggaccttatacagtctatgcatattgacgctacactgtatactgagagtgatgtacacccgtcctgtaaggtaacggccatgaaatgctttcttctggagctccaggtcatcagcttggagtctggggacgcaagcatccacgatacggttgaaaacctcatcatccttgcgaacaactctctctcatctaatggaaacgttacagagagtgggtgtaaggagtgcgaagagttggaagaaaaaaacatcaaagaatttcttcaatccttcgttcacatagtgcaaatgttcattaacacgtccactaccacacccgccccgaggccacctacgccggcaccgactatcgccagtcaacccctctctctgcgccccgaggcttgccggcctgcggctggtggggcggtccacacccggggcctggattttgcgtgcgatatatacatctgggcacctcttgccggcacctgcggagtgctgcttctctcactcgttattacgctgtactgctaagcggccgcgtcgac

SEQ ID NO: 76 - protein, 735 aa, synthetic construct
MALPVTALLLPLALLLHAARPDYKDDDDKGGGGSGGGGSDIQMTQTTSSLSASLGDRVTISCRASQDISKYLNWYQQKPDGTVKLLIYHTSRLHSGVPSRFSGSGSGTDYSLTISNLEQEDIATYFCQQGNTLPYTFGGGTKLEITGGGGSGGGGSGGGGSEVKLQESGPGLVAPSQSLSVTCTVSGVSLPDYGVSWIRQPPRKGLEWLGVIWGSETTYYNSALKSRLTIIKDNSKSQVFLKMNSLQTDDTAIYYCAKHYYYGGSYAMDYWGQGTSVTVSSTTTPAPRPPTPAPTIASQPLSLRPEACRPAAGGAVHTRGLDFACDIYIWAPLAGTCGVLLLSLVITLYCQRRKYRSNKGESPVEPAEPCRYSCPREEEGSTIPIQEDYRKPEPACSPRVKFSRSADAPAYQQGQNQLYNELNLGRREEYDVLDKRRGRDPEMGGKPRRKNPQEGLYNELQKDKMAEAYSEIGMKGERRRGKGHDGLYQGLSTATKDTYDALHMQALPPRGSGEGRGSLLTCGDVEENPGPMALPVTALLLPLALLLHAARPNWVNVISDLKKIEDLIQSMHIDATLYTESDVHPSCKVTAMKCFLLELQVISLESGDASIHDTVENLIILANNSLSSNGNVTESGCKECEELEEKNIKEFLQSFVHIVQMFINTSTTTPAPRPPTPAPTIASQPLSLRPEACRPAAGGAVHTRGLDFACDIYIWAPLAGTCGVLLLSLVITLYC

SEQ ID NO: 77 - DNA, 2150 bp, synthetic construct
  source 1..2150: mol_type = other DNA
ggatccgaattcgccgccaccatggccttaccagtgaccgccttgctcctgccgctggccttgctgctccacgccgccaggccggactacaaagacgatgacgataaaggcggtggtggctctggtggtggcggcagcgacatccagatgacacagactacatcctccctgtctgcctctctgggagacagagtcaccatcagttgcagggcaagtcaggacattagtaaatatttaaattggtatcagcagaaaccagatggaactgttaaactcctgatctaccatacatcaagattacactcaggagtcccatcaaggttcagtggcagtgggtctggaacagattattctctcaccattagcaacctggagcaagaagatattgccacttacttttgccaacagggtaatacgcttccgtacacgttcggaggggggaccaagctggagatcacaggtggcggtggctcgggcggtggtgggtcgggtggcggcggatctgaggtgaaactgcaggagtcaggacctggcctggtggcgccctcacagagcctgtccgtcacatgcactgtctcaggggtctcattacccgactatggtgtaagctggattcgccagcctccacgaaagggtctggagtggctgggagtaatatggggtagtgaaaccacatactataattcagctctcaaatccagactgaccatcatcaaggacaactccaagagccaagttttcttaaaaatgaacagtctgcaaactgatgacacagccatttactactgtgccaaacattattactacggtggtagctatgctatggactactggggccaaggaacctcagtcaccgtctcctcaaccacgacgccagcgccgcgaccaccaacaccggcgcccaccatcgcgtcgcagcccctgtccctgcgcccagaggcgtgccggccagcggcggggggcgcagtgcacacgagggggctggacttcgcctgtgatatctacatctgggcgcccttggccgggacttgtggggtccttctcctgtcactggttatcaccctttactgcatgccggaggagggttcgggctgctcggtgcggcgcaggccctatgggtgcagagtgaagttcagcaggagcgcagacgcccccgcgtaccagcagggccagaaccagctctataacgagctcaatctaggacgaagagaggagtacgatgttttggacaagagacgtggccgggaccctgagatggggggaaagccgagaaggaagaaccctcaggaaggcctgtacaatgaactgcagaaagataagatggcggaggcctacagtgagattgggatgaaaggcgagcgccggaggggcaaggggcacgatggcctttaccagggtctcagtacagccaccaaggacacctacgacgcccttcacatgcaggccctgccccctcgcggctctggcgagggaaggggttccctgcttacttgcggcgacgtcgaagagaatcccggtccgatggccctcccagtaactgccctccttttgcccctcgcactccttcttcatgccgctcgccccaactgggtcaacgtgattagcgatttgaagaaaatcgaggaccttatacagtctatgcatattgacgctacactgtatactgagagtgatgtacacccgtcctgtaaggtaacggccatgaaatgctttcttctggagctccaggtcatcagcttggagtctggggacgcaagcatccacgatacggttgaaaacctcatcatccttgcgaacaactctctctcatctaatggaaacgttacagagagtgggtgtaaggagtgcgaagagttggaagaaaaaaacatcaaagaatttcttcaatccttcgttcacatagtgcaaatgttcattaacacgtccactaccacacccgccccgaggccacctacgccggcaccgactatcgccagtcaacccctctctctgcgccccgaggcttgccggcctgcggctggtggggcggtccacacccggggcctggattttgcgtgcgatatatacatctgggcacctcttgccggcacctgcggagtgctgcttctctcactcgttattacgctgtactgctaagcggccgcgtcgac

SEQ ID NO: 78 - protein, 704 aa, synthetic construct
MALPVTALLLPLALLLHAARPDYKDDDDKGGGGSGGGGSDIQMTQTTSSLSASLGDRVTISCRASQDISKYLNWYQQKPDGTVKLLIYHTSRLHSGVPSRFSGSGSGTDYSLTISNLEQEDIATYFCQQGNTLPYTFGGGTKLEITGGGGSGGGGSGGGGSEVKLQESGPGLVAPSQSLSVTCTVSGVSLPDYGVSWIRQPPRKGLEWLGVIWGSETTYYNSALKSRLTIIKDNSKSQVFLKMNSLQTDDTAIYYCAKHYYYGGSYAMDYWGQGTSVTVSSTTTPAPRPPTPAPTIASQPLSLRPEACRPAAGGAVHTRGLDFACDIYIWAPLAGTCGVLLLSLVITLYCMPEEGSGCSVRRRPYGCRVKFSRSADAPAYQQGQNQLYNELNLGRREEYDVLDKRRGRDPEMGGKPRRKNPQEGLYNELQKDKMAEAYSEIGMKGERRRGKGHDGLYQGLSTATKDTYDALHMQALPPRGSGEGRGSLLTCGDVEENPGPMALPVTALLLPLALLLHAARPNWVNVISDLKKIEDLIQSMHIDATLYTESDVHPSCKVTAMKCFLLELQVISLESGDASIHDTVENLIILANNSLSSNGNVTESGCKECEELEEKNIKEFLQSFVHIVQMFINTSTTTPAPRPPTPAPTIASQPLSLRPEACRPAAGGAVHTRGLDFACDIYIWAPLAGTCGVLLLSLVITLYC

SEQ ID NO: 79 - DNA, 2234 bp, synthetic construct
  source 1..2234: mol_type = other DNA
ggatccgaattcgccgccaccatggccttaccagtgaccgccttgctcctgccgctggccttgctgctccacgccgccaggccggactacaaagacgatgacgataaaggcggtggtggctctggtggtggcggcagcgacatccagatgacacagactacatcctccctgtctgcctctctgggagacagagtcaccatcagttgcagggcaagtcaggacattagtaaatatttaaattggtatcagcagaaaccagatggaactgttaaactcctgatctaccatacatcaagattacactcaggagtcccatcaaggttcagtggcagtgggtctggaacagattattctctcaccattagcaacctggagcaagaagatattgccacttacttttgccaacagggtaatacgcttccgtacacgttcggaggggggaccaagctggagatcacaggtggcggtggctcgggcggtggtgggtcgggtggcggcggatctgaggtgaaactgcaggagtcaggacctggcctggtggcgccctcacagagcctgtccgtcacatgcactgtctcaggggtctcattacccgactatggtgtaagctggattcgccagcctccacgaaagggtctggagtggctgggagtaatatggggtagtgaaaccacatactataattcagctctcaaatccagactgaccatcatcaaggacaactccaagagccaagttttcttaaaaatgaacagtctgcaaactgatgacacagccatttactactgtgccaaacattattactacggtggtagctatgctatggactactggggccaaggaacctcagtcaccgtctcctcaaccacgacgccagcgccgcgaccaccaacaccggcgcccaccatcgcgtcgcagcccctgtccctgcgcccagaggcgtgccggccagcggcggggggcgcagtgcacacgagggggctggacttcgcctgtgatatctacatctgggcgcccttggccgggacttgtggggtccttctcctgtcactggttatcaccctttactgcatggaccaacaagcaatatatgctgagttaaacttacccacagactcaggcccagaaagttcttcaccttcatctcttcctcgggatgtctgtcagggttcaccttggcatcaatttgccctgaaacttagctgtagagtgaagttcagcaggagcgcagacgcccccgcgtaccagcagggccagaaccagctctataacgagctcaatctaggacgaagagaggagtacgatgttttggacaagagacgtggccgggaccctgagatggggggaaagccgagaaggaagaaccctcaggaaggcctgtacaatgaactgcagaaagataagatggcggaggcctacagtgagattgggatgaaaggcgagcgccggaggggcaaggggcacgatggcctttaccagggtctcagtacagccaccaaggacacctacgacgcccttcacatgcaggccctgccccctcgcggctctggcgagggaaggggttccctgcttacttgcggcgacgtcgaagagaatcccggtccgatggccctcccagtaactgccctccttttgcccctcgcactccttcttcatgccgctcgccccaactgggtcaacgtgattagcgatttgaagaaaatcgaggaccttatacagtctatgcatattgacgctacactgtatactgagagtgatgtacacccgtcctgtaaggtaacggccatgaaatgctttcttctggagctccaggtcatcagcttggagtctggggacgcaagcatccacgatacggttgaaaacctcatcatccttgcgaacaactctctctcatctaatggaaacgttacagagagtgggtgtaaggagtgcgaagagttggaagaaaaaaacatcaaagaatttcttcaatccttcgttcacatagtgcaaatgttcattaacacgtccactaccacacccgccccgaggccacctacgccggcaccgactatcgccagtcaacccctctctctgcgccccgaggcttgccggcctgcggctggtggggcggtccacacccggggcctggattttgcgtgcgatatatacatctgggcacctcttgccggcacctgcggagtgctgcttctctcactcgttattacgctgtactgctaagcggccgcgtcgac

SEQ ID NO: 80 - protein, 732 aa, synthetic construct
MALPVTALLLPLALLLHAARPDYKDDDDKGGGGSGGGGSDIQMTQTTSSLSASLGDRVTISCRASQDISKYLNWYQQKPDGTVKLLIYHTSRLHSGVPSRFSGSGSGTDYSLTISNLEQEDIATYFCQQGNTLPYTFGGGTKLEITGGGGSGGGGSGGGGSEVKLQESGPGLVAPSQSLSVTCTVSGVSLPDYGVSWIRQPPRKGLEWLGVIWGSETTYYNSALKSRLTIIKDNSKSQVFLKMNSLQTDDTAIYYCAKHYYYGGSYAMDYWGQGTSVTVSSTTTPAPRPPTPAPTIASQPLSLRPEACRPAAGGAVHTRGLDFACDIYIWAPLAGTCGVLLLSLVITLYCMDQQAIYAELNLPTDSGPESSSPSSLPRDVCQGSPWHQFALKLSCRVKFSRSADAPAYQQGQNQLYNELNLGRREEYDVLDKRRGRDPEMGGKPRRKNPQEGLYNELQKDKMAEAYSEIGMKGERRRGKGHDGLYQGLSTATKDTYDALHMQALPPRGSGEGRGSLLTCGDVEENPGPMALPVTALLLPLALLLHAARPNWVNVISDLKKIEDLIQSMHIDATLYTESDVHPSCKVTAMKCFLLELQVISLESGDASIHDTVENLIILANNSLSSNGNVTESGCKECEELEEKNIKEFLQSFVHIVQMFINTSTTTPAPRPPTPAPTIASQPLSLRPEACRPAAGGAVHTRGLDFACDIYIWAPLAGTCGVLLLSLVITLYC

SEQ ID NO: 81 - DNA, 2165 bp, synthetic construct
  source 1..2165: mol_type = other DNA
ggatccgaattcgccgccaccatggccttaccagtgaccgccttgctcctgccgctggccttgctgctccacgccgccaggccggactacaaagacgatgacgataaaggcggtggtggctctggtggtggcggcagcgacatccagatgacacagactacatcctccctgtctgcctctctgggagacagagtcaccatcagttgcagggcaagtcaggacattagtaaatatttaaattggtatcagcagaaaccagatggaactgttaaactcctgatctaccatacatcaagattacactcaggagtcccatcaaggttcagtggcagtgggtctggaacagattattctctcaccattagcaacctggagcaagaagatattgccacttacttttgccaacagggtaatacgcttccgtacacgttcggaggggggaccaagctggagatcacaggtggcggtggctcgggcggtggtgggtcgggtggcggcggatctgaggtgaaactgcaggagtcaggacctggcctggtggcgccctcacagagcctgtccgtcacatgcactgtctcaggggtctcattacccgactatggtgtaagctggattcgccagcctccacgaaagggtctggagtggctgggagtaatatggggtagtgaaaccacatactataattcagctctcaaatccagactgaccatcatcaaggacaactccaagagccaagttttcttaaaaatgaacagtctgcaaactgatgacacagccatttactactgtgccaaacattattactacggtggtagctatgctatggactactggggccaaggaacctcagtcaccgtctcctcaaccacgacgccagcgccgcgaccaccaacaccggcgcccaccatcgcgtcgcagcccctgtccctgcgcccagaggcgtgccggccagcggcggggggcgcagtgcacacgagggggctggacttcgcctgtgatatctacatctgggcgcccttggccgggacttgtggggtccttctcctgtcactggttatcaccctttactgcatgatcgaaacatacaaccaaacttctccccgatctgcggccactggactgcccatcagcatgaaaagagtgaagttcagcaggagcgcagacgcccccgcgtaccagcagggccagaaccagctctataacgagctcaatctaggacgaagagaggagtacgatgttttggacaagagacgtggccgggaccctgagatggggggaaagccgagaaggaagaaccctcaggaaggcctgtacaatgaactgcagaaagataagatggcggaggcctacagtgagattgggatgaaaggcgagcgccggaggggcaaggggcacgatggcctttaccagggtctcagtacagccaccaaggacacctacgacgcccttcacatgcaggccctgccccctcgcggctctggcgagggaaggggttccctgcttacttgcggcgacgtcgaagagaatcccggtccgatggccctcccagtaactgccctccttttgcccctcgcactccttcttcatgccgctcgccccaactgggtcaacgtgattagcgatttgaagaaaatcgaggaccttatacagtctatgcatattgacgctacactgtatactgagagtgatgtacacccgtcctgtaaggtaacggccatgaaatgctttcttctggagctccaggtcatcagcttggagtctggggacgcaagcatccacgatacggttgaaaacctcatcatccttgcgaacaactctctctcatctaatggaaacgttacagagagtgggtgtaaggagtgcgaagagttggaagaaaaaaacatcaaagaatttcttcaatccttcgttcacatagtgcaaatgttcattaacacgtccactaccacacccgccccgaggccacctacgccggcaccgactatcgccagtcaacccctctctctgcgccccgaggcttgccggcctgcggctggtggggcggtccacacccggggcctggattttgcgtgcgatatatacatctgggcacctcttgccggcacctgcggagtgctgcttctctcactcgttattacgctgtactgctaagcggccgcgtcgac

SEQ ID NO: 82 - protein, 709 aa, synthetic construct
MALPVTALLLPLALLLHAARPDYKDDDDKGGGGSGGGGSDIQMTQTTSSLSASLGDRVTISCRASQDISKYLNWYQQKPDGTVKLLIYHTSRLHSGVPSRFSGSGSGTDYSLTISNLEQEDIATYFCQQGNTLPYTFGGGTKLEITGGGGSGGGGSGGGGSEVKLQESGPGLVAPSQSLSVTCTVSGVSLPDYGVSWIRQPPRKGLEWLGVIWGSETTYYNSALKSRLTIIKDNSKSQVFLKMNSLQTDDTAIYYCAKHYYYGGSYAMDYWGQGTSVTVSSTTTPAPRPPTPAPTIASQPLSLRPEACRPAAGGAVHTRGLDFACDIYIWAPLAGTCGVLLLSLVITLYCMIETYNQTSPRSAATGLPISMKRVKFSRSADAPAYQQGQNQLYNELNLGRREEYDVLDKRRGRDPEMGGKPRRKNPQEGLYNELQKDKMAEAYSEIGMKGERRRGKGHDGLYQGLSTATKDTYDALHMQALPPRGSGEGRGSLLTCGDVEENPGPMALPVTALLLPLALLLHAARPNWVNVISDLKKIEDLIQSMHIDATLYTESDVHPSCKVTAMKCFLLELQVISLESGDASIHDTVENLIILANNSLSSNGNVTESGCKECEELEEKNIKEFLQSFVHIVQMFINTSTTTPAPRPPTPAPTIASQPLSLRPEACRPAAGGAVHTRGLDFACDIYIWAPLAGTCGVLLLSLVITLYC

SEQ ID NO: 83 - DNA, 2315 bp, synthetic construct
  source 1..2315: mol_type = other DNA
ggatccgaattcgccgccaccatggccttaccagtgaccgccttgctcctgccgctggccttgctgctccacgccgccaggccggactacaaagacgatgacgataaaggcggtggtggctctggtggtggcggcagcgacatccagatgacacagactacatcctccctgtctgcctctctgggagacagagtcaccatcagttgcagggcaagtcaggacattagtaaatatttaaattggtatcagcagaaaccagatggaactgttaaactcctgatctaccatacatcaagattacactcaggagtcccatcaaggttcagtggcagtgggtctggaacagattattctctcaccattagcaacctggagcaagaagatattgccacttacttttgccaacagggtaatacgcttccgtacacgttcggaggggggaccaagctggagatcacaggtggcggtggctcgggcggtggtgggtcgggtggcggcggatctgaggtgaaactgcaggagtcaggacctggcctggtggcgccctcacagagcctgtccgtcacatgcactgtctcaggggtctcattacccgactatggtgtaagctggattcgccagcctccacgaaagggtctggagtggctgggagtaatatggggtagtgaaaccacatactataattcagctctcaaatccagactgaccatcatcaaggacaactccaagagccaagttttcttaaaaatgaacagtctgcaaactgatgacacagccatttactactgtgccaaacattattactacggtggtagctatgctatggactactggggccaaggaacctcagtcaccgtctcctcaaccacgacgccagcgccgcgaccaccaacaccggcgcccaccatcgcgtcgcagcccctgtccctgcgcccagaggcgtgccggccagcggcggggggcgcagtgcacacgagggggctggacttcgcctgtgatatctacatctgggcgcccttggccgggacttgtggggtccttctcctgtcactggttatcaccctttactgcaacagtcgaagaaggtgtgggcagaagaaaaagctagtgatcaacagtggcaatggagctgtggaggacagaaagccaagtggactcaacggagaggccagcaagtctcaggaaatggtgcatttggtgaacaaggagtcgtcagaaactccagaccagtttatgacagctgatgagacaaggaacctgcagaatgtggacatgaagattggggtgagagtgaagttcagcaggagcgcagacgcccccgcgtaccagcagggccagaaccagctctataacgagctcaatctaggacgaagagaggagtacgatgttttggacaagagacgtggccgggaccctgagatggggggaaagccgagaaggaagaaccctcaggaaggcctgtacaatgaactgcagaaagataagatggcggaggcctacagtgagattgggatgaaaggcgagcgccggaggggcaaggggcacgatggcctttaccagggtctcagtacagccaccaaggacacctacgacgcccttcacatgcaggccctgccccctcgcggctctggcgagggaaggggttccctgcttacttgcggcgacgtcgaagagaatcccggtccgatggccctcccagtaactgccctccttttgcccctcgcactccttcttcatgccgctcgccccaactgggtcaacgtgattagcgatttgaagaaaatcgaggaccttatacagtctatgcatattgacgctacactgtatactgagagtgatgtacacccgtcctgtaaggtaacggccatgaaatgctttcttctggagctccaggtcatcagcttggagtctggggacgcaagcatccacgatacggttgaaaacctcatcatccttgcgaacaactctctctcatctaatggaaacgttacagagagtgggtgtaaggagtgcgaagagttggaagaaaaaaacatcaaagaatttcttcaatccttcgttcacatagtgcaaatgttcattaacacgtccactaccacacccgccccgaggccacctacgccggcaccgactatcgccagtcaacccctctctctgcgccccgaggcttgccggcctgcggctggtggggcggtccacacccggggcctggattttgcgtgcgatatatacatctgggcacctcttgccggcacctgcggagtgctgcttctctcactcgttattacgctgtactgctaagcggccgcgtcgac

SEQ ID NO: 84 - protein, 759 aa, synthetic construct
MALPVTALLLPLALLLHAARPDYKDDDDKGGGGSGGGGSDIQMTQTTSSLSASLGDRVTISCRASQDISKYLNWYQQKPDGTVKLLIYHTSRLHSGVPSRFSGSGSGTDYSLTISNLEQEDIATYFCQQGNTLPYTFGGGTKLEITGGGGSGGGGSGGGGSEVKLQESGPGLVAPSQSLSVTCTVSGVSLPDYGVSWIRQPPRKGLEWLGVIWGSETTYYNSALKSRLTIIKDNSKSQVFLKMNSLQTDDTAIYYCAKHYYYGGSYAMDYWGQGTSVTVSSTTTPAPRPPTPAPTIASQPLSLRPEACRPAAGGAVHTRGLDFACDIYIWAPLAGTCGVLLLSLVITLYCNSRRRCGQKKKLVINSGNGAVEDRKPSGLNGEASKSQEMVHLVNKESSETPDQFMTADETRNLQNVDMKIGVRVKFSRSADAPAYQQGQNQLYNELNLGRREEYDVLDKRRGRDPEMGGKPRRKNPQEGLYNELQKDKMAEAYSEIGMKGERRRGKGHDGLYQGLSTATKDTYDALHMQALPPRGSGEGRGSLLTCGDVEENPGPMALPVTALLLPLALLLHAARPNWVNVISDLKKIEDLIQSMHIDATLYTESDVHPSCKVTAMKCFLLELQVISLESGDASIHDTVENLIILANNSLSSNGNVTESGCKECEELEEKNIKEFLQSFVHIVQMFINTSTTTPAPRPPTPAPTIASQPLSLRPEACRPAAGGAVHTRGLDFACDIYIWAPLAGTCGVLLLSLVITLYC

SEQ ID NO: 85 - DNA, 1490 bp, synthetic construct
  source 1..1490: mol_type = other DNA
gaattcgccgccaccatggccttaccagtgaccgccttgctcctgccgctggccttgctgctccacgccgccaggccggacatccagatgacacagactacatcctccctgtctgcctctctgggagacagagtcaccatcagttgcagggcaagtcaggacattagtaaatatttaaattggtatcagcagaaaccagatggaactgttaaactcctgatctaccatacatcaagattacactcaggagtcccatcaaggttcagtggcagtgggtctggaacagattattctctcaccattagcaacctggagcaagaagatattgccacttacttttgccaacagggtaatacgcttccgtacacgttcggaggggggaccaagctggagatcacaggtggcggtggctcgggcggtggtgggtcgggtggcggcggatctgaggtgaaactgcaggagtcaggacctggcctggtggcgccctcacagagcctgtccgtcacatgcactgtctcaggggtctcattacccgactatggtgtaagctggattcgccagcctccacgaaagggtctggagtggctgggagtaatatggggtagtgaaaccacatactataattcagctctcaaatccagactgaccatcatcaaggacaactccaagagccaagttttcttaaaaatgaacagtctgcaaactgatgacacagccatttactactgtgccaaacattattactacggtggtagctatgctatggactactggggccaaggaacctcagtcaccgtctcctcaaccacgacgccagcgccgcgaccaccaacaccggcgcccaccatcgcgtcgcagcccctgtccctgcgcccagaggcgtgccggccagcggcggggggcgcagtgcacacgagggggctggacttcgcctgtgatatctacatctgggcgcccttggccgggacttgtggggtccttctcctgtcactggttatcaccctttactgcaaacggggcagaaagaaactcctgtatatattcaaacaaccatttatgagaccagtacaaactactcaagaggaagatggctgtagctgccgatttccagaagaagaagaaggaggatgtgaactgagagtgaagttcagcaggagcgcagacgcccccgcgtaccagcagggccagaaccagctctataacgagctcaatctaggacgaagagaggagtacgatgttttggacaagagacgtggccgggaccctgagatggggggaaagccgagaaggaagaaccctcaggaaggcctgtacaatgaactgcagaaagataagatggcggaggcctacagtgagattgggatgaaaggcgagcgccggaggggcaaggggcacgatggcctttaccagggtctcagtacagccaccaaggacacctacgacgcccttcacatgcaggccctgccccctcgctaagcggccgcgtcgac

SEQ ID NO: 86 - protein, 486 aa, synthetic construct
MALPVTALLLPLALLLHAARPDIQMTQTTSSLSASLGDRVTISCRASQDISKYLNWYQQKPDGTVKLLIYHTSRLHSGVPSRFSGSGSGTDYSLTISNLEQEDIATYFCQQGNTLPYTFGGGTKLEITGGGGSGGGGSGGGGSEVKLQESGPGLVAPSQSLSVTCTVSGVSLPDYGVSWIRQPPRKGLEWLGVIWGSETTYYNSALKSRLTIIKDNSKSQVFLKMNSLQTDDTAIYYCAKHYYYGGSYAMDYWGQGTSVTVSSTTTPAPRPPTPAPTIASQPLSLRPEACRPAAGGAVHTRGLDFACDIYIWAPLAGTCGVLLLSLVITLYCKRGRKKLLYIFKQPFMRPVQTTQEEDGCSCRFPEEEEGGCELRVKFSRSADAPAYQQGQNQLYNELNLGRREEYDVLDKRRGRDPEMGGKPRRKNPQEGLYNELQKDKMAEAYSEIGMKGERRRGKGHDGLYQGLSTATKDTYDALHMQALPPR

SEQ ID NO: 87 - DNA, 6488 bp, synthetic construct
  source 1..6488: mol_type = other DNA
atgaaagaccccacctgtaggtttggcaagctagcttaagtaacgccattttgcaaggcatggaaaatacataactgagaatagagaagttcagatcaaggttaggaacagagagacagcagaatatgggccaaacaggatatctgtggtaagcagttcctgccccggctcagggccaagaacagatggtccccagatgcggtcccgccctcagcagtttctagagaaccatcagatgtttccagggtgccccaaggacctgaaatgaccctgtgccttatttgaactaaccaatcagttcgcttctcgcttctgttcgcgcgcttctgctccccgagctcaataaaagagcccacaacccctcactcggcgcgccagtcctccgatagactgcgtcgcccgggtacccgtattcccaataaagcctcttgctgtttgcatccgaatcgtggactcgctgatccttgggagggtctcctcagattgattgactgcccacctcgggggtctttcatttggaggttccaccgagatttggagacccctgcccagggaccaccgacccccccgccgggaggtaagctggccagcggtcgtttcgtgtctgtctctgtctttgtgcgtgtttgtgccggcatctaatgtttgcgcctgcgtctgtactagttagctaactagctctgtatctggcggacccgtggtggaactgacgagttctgaacacccggccgcaaccctgggagacgtcccagggactttgggggccgtttttgtggcccgacctgaggaagggagtcgatgtggaatccgaccccgtcaggatatgtggttctggtaggagacgagaacctaaaacagttcccgcctccgtctgaatttttgctttcggtttggaaccgaagccgcgcgtcttgtctgctgcagcgctgcagcatcgttctgtgttgtctctgtctgactgtgtttctgtatttgtctgaaaattagggccagactgttaccactcccttaagtttgaccttaggtcactggaaagatgtcgagcggatcgctcacaaccagtcggtagatgtcaagaagagacgttgggttaccttctgctctgcagaatggccaacctttaacgtcggatggccgcgagacggcacctttaaccgagacctcatcacccaggttaagatcaaggtcttttcacctggcccgcatggacacccagaccaggtcccctacatcgtgacctgggaagccttggcttttgacccccctccctgggtcaagccctttgtacaccctaagcctccgcctcctcttcctccatccgccccgtctctcccccttgaacctcctcgttcgaccccgcctcgatcctccctttatccagccctcactccttctctaggcgccggaattcgttaacctcgagcgggatcaattccgccccccccctaacgttactggccgaagccgcttggaataaggccggtgtgcgtttgtctatatgttattttccaccatattgccgtcttttggcaatgtgagggcccggaaacctggccctgtcttcttgacgagcattcctaggggtctttcccctctcgccaaaggaatgcaaggtctgttgaatgtcgtgaaggaagcagttcctctggaagcttcttgaagacaaacaacgtctgtagcgaccctttgcaggcagcggaaccccccacctggcgacaggtgcctctgcggccaaaagccacgtgtataagatacacctgcaaaggcggcacaaccccagtgccacgttgtgagttggatagttgtggaaagagtcaaatggctctcctcaagcgtattcaacaaggggctgaaggatgcccagaaggtaccccattgtatgggatctgatctggggcctcggtgcacatgctttacatgtgtttagtcgaggttaaaaaaacgtctaggccccccgaaccacggggacgtggttttcctttgaaaaacacgataataccatggtgagcaagggcgaggagctgttcaccggggtggtgcccatcctggtcgagctggacggcgacgtaaacggccacaagttcagcgtgtccggcgagggcgagggcgatgccacctacggcaagctgaccctgaagttcatctgcaccaccggcaagctgcccgtgccctggcccaccctcgtgaccaccctgacctacggcgtgcagtgcttcagccgctaccccgaccacatgaagcagcacgacttcttcaagtccgccatgcccgaaggctacgtccaggagcgcaccatcttcttcaaggacgacggcaactacaagacccgcgccgaggtgaagttcgagggcgacaccctggtgaaccgcatcgagctgaagggcatcgacttcaaggaggacggcaacatcctggggcacaagctggagtacaactacaacagccacaacgtctatatcatggccgacaagcagaagaacggcatcaaggtgaacttcaagatccgccacaacatcgaggacggcagcgtgcagctcgccgaccactaccagcagaacacccccatcggcgacggccccgtgctgctgcccgacaaccactacctgagcacccagtccgccctgagcaaagaccccaacgagaagcgcgatcacatggtcctgctggagttcgtgaccgccgccgggatcactctcggcatggacgagctgtacaagtaaagcggccgcgactctagagtcgacctgcaggcatgcaagcttcaggtagccggctaacgttaacaaccggtacctctagaactatagctagcatgcgcaaatttaaagcgctgatatcgataaaataaaagattttatttagtctccagaaaaaggggggaatgaaagaccccacctgtaggtttggcaagctagcttaagtaacgccattttgcaaggcatggaaaatacataactgagaatagagaagttcagatcaaggttaggaacagagagacagcagaatatgggccaaacaggatatctgtggtaagcagttcctgccccggctcagggccaagaacagatggtccccagatgcggtcccgccctcagcagtttctagagaaccatcagatgtttccagggtgccccaaggacctgaaatgaccctgtgccttatttgaactaaccaatcagttcgcttctcgcttctgttcgcgcgcttctgctccccgagctcaataaaagagcccacaacccctcactcggcgcgccagtcctccgatagactgcgtcgcccgggtacccgtgtatccaataaaccctcttgcagttgcatccgacttgtggtctcgctgttccttgggagggtctcctctgagtgattgactacccgtcagcgggggtctttcatgggtaacagtttcttgaagttggagaacaacattctgagggtaggagtcgaatattaagtaatcctgactcaattagccactgttttgaatccacatactccaatactcctgaaatagttcattatggacagcgcagaaagagctggggagaattgtgaaattgttatccgctcacaattccacacaacatacgagccggaagcataaagtgtaaagcctggggtgcctaatgagtgagctaactcacattaattgcgttgcgctcactgcccgctttccagtcgggaaacctgtcgtgccagctgcattaatgaatcggccaacgcgcggggagaggcggtttgcgtattgggcgctcttccgcttcctcgctcactgactcgctgcgctcggtcgttcggctgcggcgagcggtatcagctcactcaaaggcggtaatacggttatccacagaatcaggggataacgcaggaaagaacatgtgagcaaaaggccagcaaaaggccaggaaccgtaaaaaggccgcgttgctggcgtttttccataggctccgcccccctgacgagcatcacaaaaatcgacgctcaagtcagaggtggcgaaacccgacaggactataaagataccaggcgtttccccctggaagctccctcgtgcgctctcctgttccgaccctgccgcttaccggatacctgtccgcctttctcccttcgggaagcgtggcgctttctcatagctcacgctgtaggtatctcagttcggtgtaggtcgttcgctccaagctgggctgtgtgcacgaaccccccgttcagcccgaccgctgcgccttatccggtaactatcgtcttgagtccaacccggtaagacacgacttatcgccactggcagcagccactggtaacaggattagcagagcgaggtatgtaggcggtgctacagagttcttgaagtggtggcctaactacggctacactagaagaacagtatttggtatctgcgctctgctgaagccagttaccttcggaaaaagagttggtagctcttgatccggcaaacaaaccaccgctggtagcggtggtttttttgtttgcaagcagcagattacgcgcagaaaaaaaggatctcaagaagatcctttgatcttttctacggggtctgacgctcagtggaacgaaaactcacgttaagggattttggtcatgagattatcaaaaaggatcttcacctagatccttttaaattaaaaatgaagttttaaatcaatctaaagtatatatgagtaaacttggtctgacagttaccaatgcttaatcagtgaggcacctatctcagcgatctgtctatttcgttcatccatagttgcctgactccccgtcgtgtagataactacgatacgggagggcttaccatctggccccagtgctgcaatgataccgcgagacccacgctcaccggctccagatttatcagcaataaaccagccagccggaagggccgagcgcagaagtggtcctgcaactttatccgcctccatccagtctattaattgttgccgggaagctagagtaagtagttcgccagttaatagtttgcgcaacgttgttgccattgctacaggcatcgtggtgtcacgctcgtcgtttggtatggcttcattcagctccggttcccaacgatcaaggcgagttacatgatcccccatgttgtgcaaaaaagcggttagctccttcggtcctccgatcgttgtcagaagtaagttggccgcagtgttatcactcatggttatggcagcactgcataattctcttactgtcatgccatccgtaagatgcttttctgtgactggtgagtactcaaccaagtcattctgagaatagtgtatgcggcgaccgagttgctcttgcccggcgtcaatacgggataataccgcgccacatagcagaactttaaaagtgctcatcattggaaaacgttcttcggggcgaaaactctcaaggatcttaccgctgttgagatccagttcgatgtaacccactcgtgcacccaactgatcttcagcatcttttactttcaccagcgtttctgggtgagcaaaaacaggaaggcaaaatgccgcaaaaaagggaataagggcgacacggaaatgttgaatactcatactcttcctttttcaatattattgaagcatttatcagggttattgtctcatgagcggatacatatttgaatgtatttagaaaaataaacaaataggggttccgcgcacatttccccgaaaagtgccacctgacgtctaagaaaccattattatcatgacattaacctataaaaataggcgtatcacgaggccctttcgtctcgcgcgtttcggtgatgacggtgaaaacctctgacacatgcagctcccggagacggtcacagcttgtctgtaagcggatgccgggagcagacaagcccgtcagggcgcgtcagcgggtgttggcgggtgtcggggctggcttaactatgcggcatcagagcagattgtactgagagtgcaccatatgcggtgtgaaataccgcacagatgcgtaaggagaaaataccgcatcaggcgccattcgccattcaggctgcgcaactgttgggaagggcgatcggtgcgggcctcttcgctattacgccagctggcgaaagggggatgtgctgcaaggcgattaagttgggtaacgccagggttttcccagtcacgacgttgtaaaacgacggcgcaaggaatggtgcatgcaaggagatggcgcccaacagtcccccggccacggggcctgccaccatacccacgccgaaacaagcgctcatgagcccgaagtggcgagcccgatcttccccatcggtgatgtcggcgatataggcgccagcaaccgcacctgtggcgccggtgatgccggccacgatgcgtccggcgtagaggcgattagtccaatttgttaaagacaggatatcagtggtccaggctctagttttgactcaacaatatcaccagctgaagcctatagagtacgagccatagataaaataaaagattttatttagtctccagaaaaagggggga

SEQ ID NO: 88 - protein, 117 aa, synthetic construct
EVQLQQSGPELVKPGASMKISCKASGYSFTGYTMNWVKQSHGKNLEWIGLINPYNGGTIYNQKFKGKATLTVDKSSSTAYMELLSLTSEDSAVYYCARDYGFVLDYWGQGTTLTVSS

SEQ ID NO: 89 - protein, 107 aa, synthetic construct
QIVLTQSPAIMSASPGEKVTITCSASSSVSYLHWFQQKPGTSPKLWVYSTSNLPSGVPARFGGSGSGTSYSLTISRMEAEDAATYYCQQRSIYPPWTFGGGTKLEIK

SEQ ID NO: 90 - protein, 107 aa, synthetic construct
QIVLTQSPSIMSVSPGEKVTITCSASSSVSYMHWFQQKPGTSPKLGIYSTSNLASGVPARFSGRGSGTSYSLTISRVAAEDAATYYCQQRSNYPPWTFGGGTKLEIK

SEQ ID NO: 91 - protein, 107 aa, synthetic construct
QIVLTQSPSIMSVSPGEKVTITCSASSSVSYMHWFQQKPGTSPKLSIYSTSNLASGVPARFSGRGSGTSYSLTISRVAAEDAATYYCQQRSNYPPWTFGGGTKLEIK

SEQ ID NO: 92 - protein, 8 aa, synthetic construct
GYSFTGYT

SEQ ID NO: 93 - protein, 8 aa, synthetic construct
INPYNGGT

SEQ ID NO: 94 - protein, 10 aa, synthetic construct
ARDYGFVLDY

SEQ ID NO: 95 - protein, 5 aa, synthetic construct
SSVSY

SEQ ID NO: 96 - skipped

SEQ ID NO: 97 - protein, 8 aa, synthetic construct
QQRSIYPP

SEQ ID NO: 98 - protein, 5 aa, synthetic construct
SSVSY

SEQ ID NO: 99 - skipped

SEQ ID NO: 100 - protein, 8 aa, synthetic construct
QQRSNYPP

SEQ ID NO: 101 - protein, 5 aa, synthetic construct
SSVSY

SEQ ID NO: 102 - skipped

SEQ ID NO: 103 - protein, 8 aa, synthetic construct
QQRSNYPP

SEQ ID NO: 104 - protein, 120 aa, synthetic construct
QVQLVQSGGGVVQPGRSLRLSCAASGVSLPDYGVSWVRQAPGKGLEWVAVIWGSETTYYNSALKSRFTISRDNSKNTLYLQMNSLRAEDTAVYYCAKHYYYGGSYAMDYWGQGTLVTVSS

SEQ ID NO: 105 - protein, 107 aa, synthetic construct
DIQMTQSPSSLSASVGDRVTITCRASQDISKYLNWYQQKPGKAIKLLIYHTSRLHSGVPSRFSGSGSGTDFTLTISSLQPEDFATYYCQQGATLPYTFGPGTKVDIK

SEQ ID NO: 106 - protein, 450 aa, synthetic construct
QVQLVQSGGGVVQPGRSLRLSCAASGVSLPDYGVSWVRQAPGKGLEWVAVIWGSETTYYNSALKSRFTISRDNSKNTLYLQMNSLRAEDTAVYYCAKHYYYGGSYAMDYWGQGTLVTVSSASTKGPSVFPLAPSSKSTSGGTAALGCLVKDYFPEPVTVSWNSGALTSGVHTFPAVLQSSGLYSLSSVVTVPSSSLGTQTYICNVNHKPSNTKVDKKVEPKSCDKTHTCPPCPAPELLGGPSVFLFPPKPKDTLMISRTPEVTCVVVDVSHEDPEVKFNWYVDGVEVHNAKTKPREEQYNSTYRVVSVLTVLHQDWLNGKEYKCKVSNKALPAPIEKTISKAKGQPREPQVYTLPPSRDELTKNQVSLTCLVKGFYPSDIAVEWESNGQPENNYKTTPPVLDSDGSFFLYSKLTVDKSRWQQGNVFSCSVMHEALHNHYTQKSLSLSPGK

SEQ ID NO: 107 - protein, 214 aa, synthetic construct
DIQMTQSPSSLSASVGDRVTITCRASQDISKYLNWYQQKPGKAIKLLIYHTSRLHSGVPSRFSGSGSGTDFTLTISSLQPEDFATYYCQQGATLPYTFGPGTKVDIKRTVAAPSVFIFPPSDEQLKSGTASVVCLLNNFYPREAKVQWKVDNALQSGNSQESVTEQDSKDSTYSLSSTLTLSKADYEKHKVYACEVTHQGLSSPVTKSFNRGEC

SEQ ID NO: 108 - protein, 11 aa, synthetic construct
RASQDISKYLN

SEQ ID NO: 109 - protein, 7 aa, synthetic construct
HTSRLHS

SEQ ID NO: 110 - protein, 9 aa, synthetic construct
QQGNTLPYT

SEQ ID NO: 111 - protein, 10 aa, synthetic construct
GVSLPDYGVS

SEQ ID NO: 112 - protein, 16 aa, synthetic construct
VIWGSETTYYSSSLKS

SEQ ID NO: 113 - protein, 16 aa, synthetic construct
VIWGSETTYYQSSLKS

SEQ ID NO: 114 - protein, 16 aa, synthetic construct
VIWGSETTYYNSSLKS

SEQ ID NO: 115 - protein, 12 aa, synthetic construct
HYYYGGSYAMDY

SEQ ID NO: 116 - protein, 242 aa, synthetic construct
EIVMTQSPATLSLSPGERATLSCRASQDISKYLNWYQQKPGQAPRLLIYHTSRLHSGIPARFSGSGSGTDYTLTISSLQPEDFAVYFCQQGNTLPYTFGQGTKLEIKGGGGSGGGGSGGGGSQVQLQESGPGLVKPSETLSLTCTVSGVSLPDYGVSWIRQPPGKGLEWIGVIWGSETTYYQSSLKSRVTISKDNSKNQVSLKLSSVTAADTAVYYCAKHYYYGGSYAMDYWGQGTLVTVSS

SEQ ID NO: 117 - protein, 107 aa, synthetic construct
DIQMTQSPSSLSASVGDRVTITCRASQDISKYLNWYQQKPGGTVKLLIYHTSRLHSGVPSRFSGSGSGTDFTLTISSLQPEDIATYYCQQGNTLPYTFGGGTKLEIT

SEQ ID NO: 118 - protein, 107 aa, synthetic construct
DIQMTQSPSSLSASVGDRVTITCRASQDISKYLNWYQQKPGGTVKLLIYHTSRLHSGVPSRFSGSGSGTDFTLTISSLQPEDIATYFCQQGNTLPYTFGGGTKLEIT

SEQ ID NO: 119 - protein, 107 aa, synthetic construct
DIQMTQSPSSLSASVGDRVTITCRASQDISKYLNWYQQKPDGTVKLLIYHTSRLHSGVPSRFSGSGSGTDYTLTISSLQPEDIATYFCQQGNTLPYTFGGGTKLEIT

SEQ ID NO: 120 - protein, 120 aa, synthetic construct
QVQLQESGPGLVKPSQTLSLTCTVSGVSLPDYGVSWIRQPPGKGLEWIGVIWGSETTYYNSALKSRLTISKDNSKNQVSLKLSSVTAADTAVYYCAKHYYYGGSYAMDYWGQGTSVTVSS

SEQ ID NO: 121 - protein, 120 aa, synthetic construct
QVQLQESGPGLVKPSQTLSLTCTVSGVSLPDYGVSWIRQPPGKGLEWLGVIWGSETTYYNSALKSRLTISKDNSKSQVSLKLSSVTAADTAVYYCAKHYYYGGSYAMDYWGQGTSVTVSS

SEQ ID NO: 122 - protein, 120 aa, synthetic construct
QVQLQESGPGLVKPSQTLSVTCTVSGVSLPDYGVSWIRQPPGKGLEWLGVIWGSETTYYNSALKSRLTISKDNSKSQVSLKLSSVTAADTAVYYCAKHYYYGGSYAMDYWGQGTSVTVSS

SEQ ID NO: 123 - protein, 120 aa, synthetic construct
QVQLQESGPGLVKPSQTLSVTCTVSGVSLPDYGVSWIRQPPRKGLEWLGVIWGSETTYYNSALKSRLTISKDNSKSQVSLKMSSVTAADTAIYYCAKHYYYGGSYAMDYWGQGTSVTVSS

SEQ ID NO: 124 - protein, 11 aa, synthetic construct
RASQDISKYLN

SEQ ID NO: 125 - protein, 7 aa, synthetic construct
HTSRLHS

SEQ ID NO: 126 - protein, 9 aa, synthetic construct
QQGNTLPYT

SEQ ID NO: 127 - protein, 11 aa, synthetic construct
RASQDISKYLN

SEQ ID NO: 128 - protein, 7 aa, synthetic construct
HTSRLHS

SEQ ID NO: 129 - protein, 9 aa, synthetic construct
QQGNTLPYT

SEQ ID NO: 130 - protein, 11 aa, synthetic construct
RASQDISKYLN

SEQ ID NO: 131 - protein, 7 aa, synthetic construct
HTSRLHS

SEQ ID NO: 132 - protein, 9 aa, synthetic construct
QQGNTLPYT

SEQ ID NO: 133 - protein, 10 aa, synthetic construct
GVSLPDYGVS

SEQ ID NO: 134 - protein, 16 aa, synthetic construct
VIWGSETTYYNSALKS

SEQ ID NO: 135 - protein, 12 aa, synthetic construct
HYYYGGSYAMDY

SEQ ID NO: 136 - protein, 10 aa, synthetic construct
GVSLPDYGVS

SEQ ID NO: 137 - protein, 16 aa, synthetic construct
VIWGSETTYYNSALKS

SEQ ID NO: 138 - protein, 12 aa, synthetic construct
HYYYGGSYAMDY

SEQ ID NO: 139 - protein, 10 aa, synthetic construct
GVSLPDYGVS

SEQ ID NO: 140 - protein, 16 aa, synthetic construct
VIWGSETTYYNSALKS

SEQ ID NO: 141 - protein, 12 aa, synthetic construct
HYYYGGSYAMDY

SEQ ID NO: 142 - protein, 10 aa, synthetic construct
GVSLPDYGVS

SEQ ID NO: 143 - protein, 16 aa, synthetic construct
VIWGSETTYYNSALKS

SEQ ID NO: 144 - protein, 12 aa, synthetic construct
HYYYGGSYAMDY

SEQ ID NO: 145 - DNA, 1122 bp, synthetic construct
  source 1..1122: mol_type = other DNA
atggccttaccagtgaccgccttgctcctgccgctggccttgctgctccacgccgccaggccgttattcaaccaagaagttcaaattcccttgaccgaaagttactgtggcccatgtcctaaaaactggatatgttacaaaaataactgctaccaattttttgatgagagtaaaaactggtatgagagccaggcttcttgtatgtctcaaaatgccagccttctgaaagtatacagcaaagaggaccaggatttacttaaactggtgaagtcatatcattggatgggactagtacacattccaacaaatggatcttggcagtgggaagatggctccattctctcacccaacctactaacaataattgaaatgcagaagggagactgtgcactctatgcctcgagctttaaaggctatatagaaaactgttcaactccaaatacgtacatctgcatgcaaaggactgtgaccacgacgccagcgccgcgaccaccaacaccggcgcccaccatcgcgtcgcagcccctgtccctgcgcccagaggcgtgccggccagcggcggggggcgcagtgcacacgagggggctggacttcgcctgtgatatctacatctgggcgcccttggccgggacttgtggggtccttctcctgtcactggttatcaccctttactgccggagggaccagaggctgccccccgatgcccacaagccccctgggggaggcagtttccggacccccatccaagaggagcaggccgacgcccactccaccctggccaagatcagagtgaagttcagcaggagcgcagacgcccccgcgtaccagcagggccagaaccagctctataacgagctcaatctaggacgaagagaggagtacgatgttttggacaagagacgtggccgggaccctgagatggggggaaagccgagaaggaagaaccctcaggaaggcctgtacaatgaactgcagaaagataagatggcggaggcctacagtgagattgggatgaaaggcgagcgccggaggggcaaggggcacgatggcctttaccagggtctcagtacagccaccaaggacacctacgacgcccttcacatgcaggccctgccccctcgc

SEQ ID NO: 146 - protein, 341 aa, synthetic construct
MALPVTALLLPLALLLHAARPLFNQEVQIPLTESYCGPCPKNWICYKNNCYQFFDESKNWYESQASCMSQNASLLKVYSKEDQDLLKLVKSYHWMGLVHIPTNGSWQWEDGSILSPNLLTIIEMQKGDCALYASSFKGYIENCSTPNTYICMQRTVESKYGPPCPSCPIYIWAPLAGTCGVLLLSLVITLYCRRDQRLPPDAHKPPGGGSFRTPIQEEQADAHSTLAKIRVKFSRSADAPAYQQGQNQLYNELNLGRREEYDVLDKRRGRDPEMGGKPRRKNPQEGLYNELQKDKMAEAYSEIGMKGERRRGKGHDGLYQGLSTATKDTYDALHMQALPPR

SEQ ID NO: 147 - DNA, 20 bp, synthetic construct
  source 1..20: mol_type = other DNA
cccctaccatgactttattc

SEQ ID NO: 148 - DNA, 20 bp, synthetic construct
  source 1..20: mol_type = other DNA
attgcactcatcagagctac

SEQ ID NO: 149 - DNA, 20 bp, synthetic construct
  source 1..20: mol_type = other DNA
agtcatggtaggggagcttg

SEQ ID NO: 150 - DNA, 20 bp, synthetic construct
  source 1..20: mol_type = other DNA
tgctggcgatacgcgtccac

SEQ ID NO: 151 - DNA, 20 bp, synthetic construct
  source 1..20: mol_type = other DNA
gtgagcaatcccccgggcga

SEQ ID NO: 152 - DNA, 20 bp, synthetic construct
  source 1..20: mol_type = other DNA
aacgtgcggtgggatcgtgc

SEQ ID NO: 153 - DNA, 20 bp, synthetic construct
  source 1..20: mol_type = other DNA
ctcaccagattcccgaaggt

SEQ ID NO: 154 - DNA, 20 bp, synthetic construct
  source 1..20: mol_type = other DNA
ccgccttgtcatcaaccgtc

SEQ ID NO: 155 - DNA, 20 bp, synthetic construct
  source 1..20: mol_type = other DNA
tctgcgttcaggggtaagcg

SEQ ID NO: 156 - DNA, 20 bp, synthetic construct
  source 1..20: mol_type = other DNA
gcgcttacccctgaacgcag

SEQ ID NO: 157 - DNA, 20 bp, synthetic construct
  source 1..20: mol_type = other DNA
cgcagaggaccatgtccccg

SEQ ID NO: 158 - DNA, 20 bp, synthetic construct
  source 1..20: mol_type = other DNA
ggagctgatggtaaatctgc

SEQ ID NO: 159 - DNA, 20 bp, synthetic construct
  source 1..20: mol_type = other DNA
ttgaaggtttaattccgcat

SEQ ID NO: 160 - DNA, 20 bp, synthetic construct
  source 1..20: mol_type = other DNA
aacaactatcgttaccacag

SEQ ID NO: 161 - DNA, 20 bp, synthetic construct
  source 1..20: mol_type = other DNA
tcaccaagcccgcgaccaat

SEQ ID NO: 162 - DNA, 20 bp, synthetic construct
  source 1..20: mol_type = other DNA
gctttggtcccattggtcgc

SEQ ID NO: 163 - DNA, 20 bp, synthetic construct
  source 1..20: mol_type = other DNA
accctcctccggcatcgccg

SEQ ID NO: 164 - DNA, 23 bp, synthetic construct
  source 1..23: mol_type = other DNA
taatctggtggacctcatgaagg

SEQ ID NO: 165 - DNA, 23 bp, synthetic construct
  source 1..23: mol_type = other DNA
tcggttggcaaacgtccgaaagg

SEQ ID NO: 166 - DNA, 23 bp, synthetic construct
  source 1..23: mol_type = other DNA
agcaagctgccgcagatcgcagg

SEQ ID NO: 167 - DNA, 23 bp, synthetic construct
  source 1..23: mol_type = other DNA
gaacggtaggtcccctctcgtgg

SEQ ID NO: 168 - DNA, 23 bp, synthetic construct
  source 1..23: mol_type = other DNA
agctgccttggacgacgggcagg

SEQ ID NO: 169 - DNA, 23 bp, synthetic construct
  source 1..23: mol_type = other DNA
tgagccgtaacttcattgagagg

SEQ ID NO: 170 - DNA, 20 bp, synthetic construct
  source 1..20: mol_type = other DNA
agtgctggtgttgggcgcac

SEQ ID NO: 171 - DNA, 23 bp, synthetic construct
  source 1..23: mol_type = other DNA
gtgaacagtgccgttccgggggg

SEQ ID NO: 172 - DNA, 23 bp, synthetic construct
  source 1..23: mol_type = other DNA
ggcaccggtacatttgttaatgg

SEQ ID NO: 173 - DNA, 23 bp, synthetic construct
  source 1..23: mol_type = other DNA
ttcgccagacgcgccgcctgcgg

SEQ ID NO: 174 - protein, 374 aa, synthetic construct
MALPVTALLLPLALLLHAARPLFNQEVQIPLTESYCGPCPKNWICYKNNCYQFFDESKNWYESQASCMSQNASLLKVYSKEDQDLLKLVKSYHWMGLVHIPTNGSWQWEDGSILSPNLLTIIEMQKGDCALYASSFKGYIENCSTPNTYICMQRTVTTTPAPRPPTPAPTIASQPLSLRPEACRPAAGGAVHTRGLDFACDIYIWAPLAGTCGVLLLSLVITLYCRRDQRLPPDAHKPPGGGSFRTPIQEEQADAHSTLAKIRVKFSRSADAPAYQQGQNQLYNELNLGRREEYDVLDKRRGRDPEMGGKPRRKNPQEGLYNELQKDKMAEAYSEIGMKGERRRGKGHDGLYQGLSTATKDTYDALHMQALPPR

SEQ ID NO: 175 - DNA, 2150 bp, synthetic construct
  source 1..2150: mol_type = other DNA
gaattcgccgccaccatggccttaccagtgaccgccttgctcctgccgctggccttgctgctccacgccgccaggccggatattcagatgacccagagcccgagcagcctgagcgcgagcgtgggcgatcgcgtgaccattacctgccgcgcgagccaggatattagcaaatatctgaactggtatcagcagaaaccgggcggcaccgtgaaactgctgatttatcataccagccgcctgcatagcggcgtgccgagccgctttagcggcagcggcagcggcaccgattttaccctgaccattagcagcctgcagccggaagatattgcgacctattattgccagcagggcaacaccctgccgtatacctttggcggcggcaccaaactggaaattaccggtggcggtggctcgggcggtggtgggtcgggtggcggcggatctcaggtgcagctgcaggaaagcggcccgggcctggtgaaaccgagccagaccctgagcctgacctgcaccgtgagcggcgtgagcctgccggattatggcgtgagctggattcgccagccgccgggcaaaggcctggaatggattggcgtgatttggggcagcgaaaccacctattataacagcgcgctgaaaagccgcctgaccattagcaaagataacagcaaaaaccaggtgagcctgaaactgagcagcgtgaccgcggcggataccgcggtgtattattgcgcgaaacattattattatggcggcagctatgcgatggattattggggccagggcaccagcgtgaccgtgagcagcaccacgacgccagcgccgcgaccaccaacaccggcgcccaccatcgcgtcgcagcccctgtccctgcgcccagaggcgtgccggccagcggcggggggcgcagtgcacacgagggggctggacttcgcctgtgatatctacatctgggcgcccttggccgggacttgtggggtccttctcctgtcactggttatcaccctttactgccggagggaccagaggctgccccccgatgcccacaagccccctgggggaggcagtttccggacccccatccaagaggagcaggccgacgcccactccaccctggccaagatcagagtgaagttcagcaggagcgcagacgcccccgcgtaccagcagggccagaaccagctctataacgagctcaatctaggacgaagagaggagtacgatgttttggacaagagacgtggccgggaccctgagatggggggaaagccgagaaggaagaaccctcaggaaggcctgtacaatgaactgcagaaagataagatggcggaggcctacagtgagattgggatgaaaggcgagcgccggaggggcaaggggcacgatggcctttaccagggtctcagtacagccaccaaggacacctacgacgcccttcacatgcaggccctgccccctcgcggctctggcgagggaaggggttccctgcttacttgcggcgacgtcgaagagaatcccggtccgatggccctcccagtaactgccctccttttgcccctcgcactccttcttcatgccgctcgccccaactgggtcaacgtgattagcgatttgaagaaaatcgaggaccttatacagtctatgcatattgacgctacactgtatactgagagtgatgtacacccgtcctgtaaggtaacggccatgaaatgctttcttctggagctccaggtcatcagcttggagtctggggacgcaagcatccacgatacggttgaaaacctcatcatccttgcgaacaactctctctcatctaatggaaacgttacagagagtgggtgtaaggagtgcgaagagttggaagaaaaaaacatcaaagaatttcttcaatccttcgttcacatagtgcaaatgttcattaacacgtccactaccacacccgccccgaggccacctacgccggcaccgactatcgccagtcaacccctctctctgcgccccgaggcttgccggcctgcggctggtggggcggtccacacccggggcctggattttgcgtgcgatatatacatctgggcacctcttgccggcacctgcggagtgctgcttctctcactcgttattacgctgtactgctaagcggccgcgtcgac

SEQ ID NO: 176 - protein, 706 aa, synthetic construct
MALPVTALLLPLALLLHAARPDIQMTQSPSSLSASVGDRVTITCRASQDISKYLNWYQQKPGGTVKLLIYHTSRLHSGVPSRFSGSGSGTDFTLTISSLQPEDIATYYCQQGNTLPYTFGGGTKLEITGGGGSGGGGSGGGGSQVQLQESGPGLVKPSQTLSLTCTVSGVSLPDYGVSWIRQPPGKGLEWIGVIWGSETTYYNSALKSRLTISKDNSKNQVSLKLSSVTAADTAVYYCAKHYYYGGSYAMDYWGQGTSVTVSSTTTPAPRPPTPAPTIASQPLSLRPEACRPAAGGAVHTRGLDFACDIYIWAPLAGTCGVLLLSLVITLYCRRDQRLPPDAHKPPGGGSFRTPIQEEQADAHSTLAKIRVKFSRSADAPAYQQGQNQLYNELNLGRREEYDVLDKRRGRDPEMGGKPRRKNPQEGLYNELQKDKMAEAYSEIGMKGERRRGKGHDGLYQGLSTATKDTYDALHMQALPPRGSGEGRGSLLTCGDVEENPGPMALPVTALLLPLALLLHAARPNWVNVISDLKKIEDLIQSMHIDATLYTESDVHPSCKVTAMKCFLLELQVISLESGDASIHDTVENLIILANNSLSSNGNVTESGCKECEELEEKNIKEFLQSFVHIVQMFINTSTTTPAPRPPTPAPTIASQPLSLRPEACRPAAGGAVHTRGLDFACDIYIWAPLAGTCGVLLLSLVITLYC

SEQ ID NO: 177 - DNA, 2150 bp, synthetic construct
  source 1..2150: mol_type = other DNA
gaattcgccgccaccatggccttaccagtgaccgccttgctcctgccgctggccttgctgctccacgccgccaggccggatattcagatgacccagagcccgagcagcctgagcgcgagcgtgggcgatcgcgtgaccattacctgccgcgcgagccaggatattagcaaatatctgaactggtatcagcagaaaccgggcggcaccgtgaaactgctgatttatcataccagccgcctgcatagcggcgtgccgagccgctttagcggcagcggcagcggcaccgattttaccctgaccattagcagcctgcagccggaagatattgcgacctatttttgccagcagggcaacaccctgccgtatacctttggcggcggcaccaaactggaaattaccggtggcggtggctcgggcggtggtgggtcgggtggcggcggatctcaggtgcagctgcaggaaagcggcccgggcctggtgaaaccgagccagaccctgagcctgacctgcaccgtgagcggcgtgagcctgccggattatggcgtgagctggattcgccagccgccgggcaaaggcctggaatggattggcgtgatttggggcagcgaaaccacctattataacagcgcgctgaaaagccgcctgaccattagcaaagataacagcaaaaaccaggtgagcctgaaactgagcagcgtgaccgcggcggataccgcggtgtattattgcgcgaaacattattattatggcggcagctatgcgatggattattggggccagggcaccagcgtgaccgtgagcagcaccacgacgccagcgccgcgaccaccaacaccggcgcccaccatcgcgtcgcagcccctgtccctgcgcccagaggcgtgccggccagcggcggggggcgcagtgcacacgagggggctggacttcgcctgtgatatctacatctgggcgcccttggccgggacttgtggggtccttctcctgtcactggttatcaccctttactgccggagggaccagaggctgccccccgatgcccacaagccccctgggggaggcagtttccggacccccatccaagaggagcaggccgacgcccactccaccctggccaagatcagagtgaagttcagcaggagcgcagacgcccccgcgtaccagcagggccagaaccagctctataacgagctcaatctaggacgaagagaggagtacgatgttttggacaagagacgtggccgggaccctgagatggggggaaagccgagaaggaagaaccctcaggaaggcctgtacaatgaactgcagaaagataagatggcggaggcctacagtgagattgggatgaaaggcgagcgccggaggggcaaggggcacgatggcctttaccagggtctcagtacagccaccaaggacacctacgacgcccttcacatgcaggccctgccccctcgcggctctggcgagggaaggggttccctgcttacttgcggcgacgtcgaagagaatcccggtccgatggccctcccagtaactgccctccttttgcccctcgcactccttcttcatgccgctcgccccaactgggtcaacgtgattagcgatttgaagaaaatcgaggaccttatacagtctatgcatattgacgctacactgtatactgagagtgatgtacacccgtcctgtaaggtaacggccatgaaatgctttcttctggagctccaggtcatcagcttggagtctggggacgcaagcatccacgatacggttgaaaacctcatcatccttgcgaacaactctctctcatctaatggaaacgttacagagagtgggtgtaaggagtgcgaagagttggaagaaaaaaacatcaaagaatttcttcaatccttcgttcacatagtgcaaatgttcattaacacgtccactaccacacccgccccgaggccacctacgccggcaccgactatcgccagtcaacccctctctctgcgccccgaggcttgccggcctgcggctggtggggcggtccacacccggggcctggattttgcgtgcgatatatacatctgggcacctcttgccggcacctgcggagtgctgcttctctcactcgttattacgctgtactgctaagcggccgcgtcgac

SEQ ID NO: 178 - protein, 706 aa, synthetic construct
MALPVTALLLPLALLLHAARPDIQMTQSPSSLSASVGDRVTITCRASQDISKYLNWYQQKPGGTVKLLIYHTSRLHSGVPSRFSGSGSGTDFTLTISSLQPEDIATYFCQQGNTLPYTFGGGTKLEITGGGGSGGGGSGGGGSQVQLQESGPGLVKPSQTLSLTCTVSGVSLPDYGVSWIRQPPGKGLEWIGVIWGSETTYYNSALKSRLTISKDNSKNQVSLKLSSVTAADTAVYYCAKHYYYGGSYAMDYWGQGTSVTVSSTTTPAPRPPTPAPTIASQPLSLRPEACRPAAGGAVHTRGLDFACDIYIWAPLAGTCGVLLLSLVITLYCRRDQRLPPDAHKPPGGGSFRTPIQEEQADAHSTLAKIRVKFSRSADAPAYQQGQNQLYNELNLGRREEYDVLDKRRGRDPEMGGKPRRKNPQEGLYNELQKDKMAEAYSEIGMKGERRRGKGHDGLYQGLSTATKDTYDALHMQALPPRGSGEGRGSLLTCGDVEENPGPMALPVTALLLPLALLLHAARPNWVNVISDLKKIEDLIQSMHIDATLYTESDVHPSCKVTAMKCFLLELQVISLESGDASIHDTVENLIILANNSLSSNGNVTESGCKECEELEEKNIKEFLQSFVHIVQMFINTSTTTPAPRPPTPAPTIASQPLSLRPEACRPAAGGAVHTRGLDFACDIYIWAPLAGTCGVLLLSLVITLYC

SEQ ID NO: 179 - DNA, 2150 bp, synthetic construct
  source 1..2150: mol_type = other DNA
gaattcgccgccaccatggccttaccagtgaccgccttgctcctgccgctggccttgctgctccacgccgccaggccggatattcagatgacccagagcccgagcagcctgagcgcgagcgtgggcgatcgcgtgaccattacctgccgcgcgagccaggatattagcaaatatctgaactggtatcagcagaaaccggatggcaccgtgaaactgctgatttatcataccagccgcctgcatagcggcgtgccgagccgctttagcggcagcggcagcggcaccgattataccctgaccattagcagcctgcagccggaagatattgcgacctatttttgccagcagggcaacaccctgccgtatacctttggcggcggcaccaaactggaaattaccggtggcggtggctcgggcggtggtgggtcgggtggcggcggatctcaggtgcagctgcaggaaagcggcccgggcctggtgaaaccgagccagaccctgagcctgacctgcaccgtgagcggcgtgagcctgccggattatggcgtgagctggattcgccagccgccgggcaaaggcctggaatggattggcgtgatttggggcagcgaaaccacctattataacagcgcgctgaaaagccgcctgaccattagcaaagataacagcaaaaaccaggtgagcctgaaactgagcagcgtgaccgcggcggataccgcggtgtattattgcgcgaaacattattattatggcggcagctatgcgatggattattggggccagggcaccagcgtgaccgtgagcagcaccacgacgccagcgccgcgaccaccaacaccggcgcccaccatcgcgtcgcagcccctgtccctgcgcccagaggcgtgccggccagcggcggggggcgcagtgcacacgagggggctggacttcgcctgtgatatctacatctgggcgcccttggccgggacttgtggggtccttctcctgtcactggttatcaccctttactgccggagggaccagaggctgccccccgatgcccacaagccccctgggggaggcagtttccggacccccatccaagaggagcaggccgacgcccactccaccctggccaagatcagagtgaagttcagcaggagcgcagacgcccccgcgtaccagcagggccagaaccagctctataacgagctcaatctaggacgaagagaggagtacgatgttttggacaagagacgtggccgggaccctgagatggggggaaagccgagaaggaagaaccctcaggaaggcctgtacaatgaactgcagaaagataagatggcggaggcctacagtgagattgggatgaaaggcgagcgccggaggggcaaggggcacgatggcctttaccagggtctcagtacagccaccaaggacacctacgacgcccttcacatgcaggccctgccccctcgcggctctggcgagggaaggggttccctgcttacttgcggcgacgtcgaagagaatcccggtccgatggccctcccagtaactgccctccttttgcccctcgcactccttcttcatgccgctcgccccaactgggtcaacgtgattagcgatttgaagaaaatcgaggaccttatacagtctatgcatattgacgctacactgtatactgagagtgatgtacacccgtcctgtaaggtaacggccatgaaatgctttcttctggagctccaggtcatcagcttggagtctggggacgcaagcatccacgatacggttgaaaacctcatcatccttgcgaacaactctctctcatctaatggaaacgttacagagagtgggtgtaaggagtgcgaagagttggaagaaaaaaacatcaaagaatttcttcaatccttcgttcacatagtgcaaatgttcattaacacgtccactaccacacccgccccgaggccacctacgccggcaccgactatcgccagtcaacccctctctctgcgccccgaggcttgccggcctgcggctggtggggcggtccacacccggggcctggattttgcgtgcgatatatacatctgggcacctcttgccggcacctgcggagtgctgcttctctcactcgttattacgctgtactgctaagcggccgcgtcgac

SEQ ID NO: 180 - protein, 706 aa, synthetic construct
MALPVTALLLPLALLLHAARPDIQMTQSPSSLSASVGDRVTITCRASQDISKYLNWYQQKPDGTVKLLIYHTSRLHSGVPSRFSGSGSGTDYTLTISSLQPEDIATYFCQQGNTLPYTFGGGTKLEITGGGGSGGGGSGGGGSQVQLQESGPGLVKPSQTLSLTCTVSGVSLPDYGVSWIRQPPGKGLEWIGVIWGSETTYYNSALKSRLTISKDNSKNQVSLKLSSVTAADTAVYYCAKHYYYGGSYAMDYWGQGTSVTVSSTTTPAPRPPTPAPTIASQPLSLRPEACRPAAGGAVHTRGLDFACDIYIWAPLAGTCGVLLLSLVITLYCRRDQRLPPDAHKPPGGGSFRTPIQEEQADAHSTLAKIRVKFSRSADAPAYQQGQNQLYNELNLGRREEYDVLDKRRGRDPEMGGKPRRKNPQEGLYNELQKDKMAEAYSEIGMKGERRRGKGHDGLYQGLSTATKDTYDALHMQALPPRGSGEGRGSLLTCGDVEENPGPMALPVTALLLPLALLLHAARPNWVNVISDLKKIEDLIQSMHIDATLYTESDVHPSCKVTAMKCFLLELQVISLESGDASIHDTVENLIILANNSLSSNGNVTESGCKECEELEEKNIKEFLQSFVHIVQMFINTSTTTPAPRPPTPAPTIASQPLSLRPEACRPAAGGAVHTRGLDFACDIYIWAPLAGTCGVLLLSLVITLYC

SEQ ID NO: 181 - DNA, 2150 bp, synthetic construct
  source 1..2150: mol_type = other DNA
gaattcgccgccaccatggccttaccagtgaccgccttgctcctgccgctggccttgctgctccacgccgccaggccggatattcagatgacccagagcccgagcagcctgagcgcgagcgtgggcgatcgcgtgaccattacctgccgcgcgagccaggatattagcaaatatctgaactggtatcagcagaaaccgggcggcaccgtgaaactgctgatttatcataccagccgcctgcatagcggcgtgccgagccgctttagcggcagcggcagcggcaccgattttaccctgaccattagcagcctgcagccggaagatattgcgacctattattgccagcagggcaacaccctgccgtatacctttggcggcggcaccaaactggaaattaccggtggcggtggctcgggcggtggtgggtcgggtggcggcggatctcaggtgcagctgcaggaaagcggcccgggcctggtgaaaccgagccagaccctgagcctgacctgcaccgtgagcggcgtgagcctgccggattatggcgtgagctggattcgccagccgccgggcaaaggcctggaatggctgggcgtgatttggggcagcgaaaccacctattataacagcgcgctgaaaagccgcctgaccattagcaaagataacagcaaaagccaggtgagcctgaaactgagcagcgtgaccgcggcggataccgcggtgtattattgcgcgaaacattattattatggcggcagctatgcgatggattattggggccagggcaccagcgtgaccgtgagcagcaccacgacgccagcgccgcgaccaccaacaccggcgcccaccatcgcgtcgcagcccctgtccctgcgcccagaggcgtgccggccagcggcggggggcgcagtgcacacgagggggctggacttcgcctgtgatatctacatctgggcgcccttggccgggacttgtggggtccttctcctgtcactggttatcaccctttactgccggagggaccagaggctgccccccgatgcccacaagccccctgggggaggcagtttccggacccccatccaagaggagcaggccgacgcccactccaccctggccaagatcagagtgaagttcagcaggagcgcagacgcccccgcgtaccagcagggccagaaccagctctataacgagctcaatctaggacgaagagaggagtacgatgttttggacaagagacgtggccgggaccctgagatggggggaaagccgagaaggaagaaccctcaggaaggcctgtacaatgaactgcagaaagataagatggcggaggcctacagtgagattgggatgaaaggcgagcgccggaggggcaaggggcacgatggcctttaccagggtctcagtacagccaccaaggacacctacgacgcccttcacatgcaggccctgccccctcgcggctctggcgagggaaggggttccctgcttacttgcggcgacgtcgaagagaatcccggtccgatggccctcccagtaactgccctccttttgcccctcgcactccttcttcatgccgctcgccccaactgggtcaacgtgattagcgatttgaagaaaatcgaggaccttatacagtctatgcatattgacgctacactgtatactgagagtgatgtacacccgtcctgtaaggtaacggccatgaaatgctttcttctggagctccaggtcatcagcttggagtctggggacgcaagcatccacgatacggttgaaaacctcatcatccttgcgaacaactctctctcatctaatggaaacgttacagagagtgggtgtaaggagtgcgaagagttggaagaaaaaaacatcaaagaatttcttcaatccttcgttcacatagtgcaaatgttcattaacacgtccactaccacacccgccccgaggccacctacgccggcaccgactatcgccagtcaacccctctctctgcgccccgaggcttgccggcctgcggctggtggggcggtccacacccggggcctggattttgcgtgcgatatatacatctgggcacctcttgccggcacctgcggagtgctgcttctctcactcgttattacgctgtactgctaagcggccgcgtcgac

SEQ ID NO: 182 - protein, 706 aa, synthetic construct
MALPVTALLLPLALLLHAARPDIQMTQSPSSLSASVGDRVTITCRASQDISKYLNWYQQKPGGTVKLLIYHTSRLHSGVPSRFSGSGSGTDFTLTISSLQPEDIATYYCQQGNTLPYTFGGGTKLEITGGGGSGGGGSGGGGSQVQLQESGPGLVKPSQTLSLTCTVSGVSLPDYGVSWIRQPPGKGLEWLGVIWGSETTYYNSALKSRLTISKDNSKSQVSLKLSSVTAADTAVYYCAKHYYYGGSYAMDYWGQGTSVTVSSTTTPAPRPPTPAPTIASQPLSLRPEACRPAAGGAVHTRGLDFACDIYIWAPLAGTCGVLLLSLVITLYCRRDQRLPPDAHKPPGGGSFRTPIQEEQADAHSTLAKIRVKFSRSADAPAYQQGQNQLYNELNLGRREEYDVLDKRRGRDPEMGGKPRRKNPQEGLYNELQKDKMAEAYSEIGMKGERRRGKGHDGLYQGLSTATKDTYDALHMQALPPRGSGEGRGSLLTCGDVEENPGPMALPVTALLLPLALLLHAARPNWVNVISDLKKIEDLIQSMHIDATLYTESDVHPSCKVTAMKCFLLELQVISLESGDASIHDTVENLIILANNSLSSNGNVTESGCKECEELEEKNIKEFLQSFVHIVQMFINTSTTTPAPRPPTPAPTIASQPLSLRPEACRPAAGGAVHTRGLDFACDIYIWAPLAGTCGVLLLSLVITLYC

SEQ ID NO: 183 - DNA, 2153 bp, synthetic construct
  source 1..2153: mol_type = other DNA
gaattcgccgccaccatggccttaccagtgaccgccttgctcctgccgctggccttgctgctccacgccgccaggccggatattcagatgacccagagcccgagcagcctgagcgcgagcgtgggcgatcgcgtgaccattacctgccgcgcgagccaggatattagcaaatatctgaactggtatcagcagaaaccgggcggcaccgtgaaactgctgatttatcataccagccgcctgcatagcggcgtgccgagccgctttagcggcagcggcagcggcaccgattttaccctgaccattagcagcctgcagccggaagatattgcgacctatttttgccagcagggcaacaccctgccgtatacctttggcggcggcaccaaactggaaattaccggtggcggtggctcgggcggtggtgggtcgggtggcggcggatctcaggtgcagctgcaggagtcaggacctggcctggtgaaaccctcacagactctgtccctgacatgcactgtctcaggggtctcattacccgactatggtgtaagctggattcgccagcctccaggtaagggtctggagtggctgggagtaatatggggtagtgaaaccacatactataattcagctctcaaatccagactgaccatctccaaggacaactccaagagccaagtttccttaaaattaagtagtgttactgctgctgacacagccgtctactactgtgccaaacattattactacggtggtagctatgctatggactactggggccaaggaacctcagtcaccgtctcctcaaccacgacgccagcgccgcgaccaccaacaccggcgcccaccatcgcgtcgcagcccctgtccctgcgcccagaggcgtgccggccagcggcggggggcgcagtgcacacgagggggctggacttcgcctgtgatatctacatctgggcgcccttggccgggacttgtggggtccttctcctgtcactggttatcaccctttactgccggagggaccagaggctgccccccgatgcccacaagccccctgggggaggcagtttccggacccccatccaagaggagcaggccgacgcccactccaccctggccaagatcagagtgaagttcagcagatctagcgcagacgcccccgcgtaccagcagggccagaaccagctctataacgagctcaatctaggacgaagagaggagtacgatgttttggacaagagacgtggccgggaccctgagatggggggaaagccgagaaggaagaaccctcaggaaggcctgtacaatgaactgcagaaagataagatggcggaggcctacagtgagattgggatgaaaggcgagcgccggaggggcaaggggcacgatggcctttaccagggtctcagtacagccaccaaggacacctacgacgcccttcacatgcaggccctgccccctcgcggctctggcgagggaaggggttccctgcttacttgcggcgacgtcgaagagaatcccggtccgatggccctcccagtaactgccctccttttgcccctcgcactccttcttcatgccgctcgccccaactgggtcaacgtgattagcgatttgaagaaaatcgaggaccttatacagtctatgcatattgacgctacactgtatactgagagtgatgtacacccgtcctgtaaggtaacggccatgaaatgctttcttctggagctccaggtcatcagcttggagtctggggacgcaagcatccacgatacggttgaaaacctcatcatccttgcgaacaactctctctcatctaatggaaacgttacagagagtgggtgtaaggagtgcgaagagttggaagaaaaaaacatcaaagaatttcttcaatccttcgttcacatagtgcaaatgttcattaacacgtccactaccacacccgccccgaggccacctacgccggcaccgactatcgccagtcaacccctctctctgcgccccgaggcttgccggcctgcggctggtggggcggtccacacccggggcctggattttgcgtgcgatatatacatctgggcacctcttgccggcacctgcggagtgctgcttctctcactcgttattacgctgtactgctaagcggccgcgtcgac

SEQ ID NO: 184 - protein, 707 aa, synthetic construct
MALPVTALLLPLALLLHAARPDIQMTQSPSSLSASVGDRVTITCRASQDISKYLNWYQQKPGGTVKLLIYHTSRLHSGVPSRFSGSGSGTDFTLTISSLQPEDIATYFCQQGNTLPYTFGGGTKLEITGGGGSGGGGSGGGGSQVQLQESGPGLVKPSQTLSLTCTVSGVSLPDYGVSWIRQPPGKGLEWLGVIWGSETTYYNSALKSRLTISKDNSKSQVSLKLSSVTAADTAVYYCAKHYYYGGSYAMDYWGQGTSVTVSSTTTPAPRPPTPAPTIASQPLSLRPEACRPAAGGAVHTRGLDFACDIYIWAPLAGTCGVLLLSLVITLYCRRDQRLPPDAHKPPGGGSFRTPIQEEQADAHSTLAKIRVKFSRSSADAPAYQQGQNQLYNELNLGRREEYDVLDKRRGRDPEMGGKPRRKNPQEGLYNELQKDKMAEAYSEIGMKGERRRGKGHDGLYQGLSTATKDTYDALHMQALPPRGSGEGRGSLLTCGDVEENPGPMALPVTALLLPLALLLHAARPNWVNVISDLKKIEDLIQSMHIDATLYTESDVHPSCKVTAMKCFLLELQVISLESGDASIHDTVENLIILANNSLSSNGNVTESGCKECEELEEKNIKEFLQSFVHIVQMFINTSTTTPAPRPPTPAPTIASQPLSLRPEACRPAAGGAVHTRGLDFACDIYIWAPLAGTCGVLLLSLVITLYC

SEQ ID NO: 185 - DNA, 2150 bp, synthetic construct
  source 1..2150: mol_type = other DNA
gaattcgccgccaccatggccttaccagtgaccgccttgctcctgccgctggccttgctgctccacgccgccaggccggacatccagatgacacagagcccgtcctccctgtctgcctctgtgggagacagagtcaccatcacctgcagggcaagtcaggacattagtaaatatttaaattggtatcagcagaaaccagacggaactgttaaactcctgatctaccatacatcaagattacactcaggagtcccatcaaggttcagtggcagtgggtctggaacagattacaccctcaccattagcagcctgcaaccggaagatattgccacttacttctgccaacagggtaatacgcttccgtacacgttcggaggggggaccaagctggagatcacaggtggcggtggctcgggcggtggtgggtcgggtggcggcggatctcaggtgcagctgcaggagtcaggacctggcctggtgaaaccctcacagactctgtccctgacatgcactgtctcaggggtctcattacccgactatggtgtaagctggattcgccagcctccaggtaagggtctggagtggctgggagtaatatggggtagtgaaaccacatactataattcagctctcaaatccagactgaccatctccaaggacaactccaagagccaagtttccttaaaattaagtagtgttactgctgctgacacagccgtctactactgtgccaaacattattactacggtggtagctatgctatggactactggggccaaggaacctcagtcaccgtctcctcaaccacgacgccagcgccgcgaccaccaacaccggcgcccaccatcgcgtcgcagcccctgtccctgcgcccagaggcgtgccggccagcggcggggggcgcagtgcacacgagggggctggacttcgcctgtgatatctacatctgggcgcccttggccgggacttgtggggtccttctcctgtcactggttatcaccctttactgccggagggaccagaggctgccccccgatgcccacaagccccctgggggaggcagtttccggacccccatccaagaggagcaggccgacgcccactccaccctggccaagatcagagtgaagttcagcaggagcgcagacgcccccgcgtaccagcagggccagaaccagctctataacgagctcaatctaggacgaagagaggagtacgatgttttggacaagagacgtggccgggaccctgagatggggggaaagccgagaaggaagaaccctcaggaaggcctgtacaatgaactgcagaaagataagatggcggaggcctacagtgagattgggatgaaaggcgagcgccggaggggcaaggggcacgatggcctttaccagggtctcagtacagccaccaaggacacctacgacgcccttcacatgcaggccctgccccctcgcggctctggcgagggaaggggttccctgcttacttgcggcgacgtcgaagagaatcccggtccgatggccctcccagtaactgccctccttttgcccctcgcactccttcttcatgccgctcgccccaactgggtcaacgtgattagcgatttgaagaaaatcgaggaccttatacagtctatgcatattgacgctacactgtatactgagagtgatgtacacccgtcctgtaaggtaacggccatgaaatgctttcttctggagctccaggtcatcagcttggagtctggggacgcaagcatccacgatacggttgaaaacctcatcatccttgcgaacaactctctctcatctaatggaaacgttacagagagtgggtgtaaggagtgcgaagagttggaagaaaaaaacatcaaagaatttcttcaatccttcgttcacatagtgcaaatgttcattaacacgtccactaccacacccgccccgaggccacctacgccggcaccgactatcgccagtcaacccctctctctgcgccccgaggcttgccggcctgcggctggtggggcggtccacacccggggcctggattttgcgtgcgatatatacatctgggcacctcttgccggcacctgcggagtgctgcttctctcactcgttattacgctgtactgctaagcggccgcgtcgac

SEQ ID NO: 186 - protein, 706 aa, synthetic construct
MALPVTALLLPLALLLHAARPDIQMTQSPSSLSASVGDRVTITCRASQDISKYLNWYQQKPDGTVKLLIYHTSRLHSGVPSRFSGSGSGTDYTLTISSLQPEDIATYFCQQGNTLPYTFGGGTKLEITGGGGSGGGGSGGGGSQVQLQESGPGLVKPSQTLSLTCTVSGVSLPDYGVSWIRQPPGKGLEWLGVIWGSETTYYNSALKSRLTISKDNSKSQVSLKLSSVTAADTAVYYCAKHYYYGGSYAMDYWGQGTSVTVSSTTTPAPRPPTPAPTIASQPLSLRPEACRPAAGGAVHTRGLDFACDIYIWAPLAGTCGVLLLSLVITLYCRRDQRLPPDAHKPPGGGSFRTPIQEEQADAHSTLAKIRVKFSRSADAPAYQQGQNQLYNELNLGRREEYDVLDKRRGRDPEMGGKPRRKNPQEGLYNELQKDKMAEAYSEIGMKGERRRGKGHDGLYQGLSTATKDTYDALHMQALPPRGSGEGRGSLLTCGDVEENPGPMALPVTALLLPLALLLHAARPNWVNVISDLKKIEDLIQSMHIDATLYTESDVHPSCKVTAMKCFLLELQVISLESGDASIHDTVENLIILANNSLSSNGNVTESGCKECEELEEKNIKEFLQSFVHIVQMFINTSTTTPAPRPPTPAPTIASQPLSLRPEACRPAAGGAVHTRGLDFACDIYIWAPLAGTCGVLLLSLVITLYC

SEQ ID NO: 187 - DNA, 2150 bp, synthetic construct
  source 1..2150: mol_type = other DNA
gaattcgccgccaccatggccttaccagtgaccgccttgctcctgccgctggccttgctgctccacgccgccaggccggacatccagatgacacagagcccgtcctccctgtctgcctctgtgggagacagagtcaccatcacctgcagggcaagtcaggacattagtaaatatttaaattggtatcagcagaaaccaggtggaactgttaaactcctgatctaccatacatcaagattacactcaggagtcccatcaaggttcagtggcagtgggtctggaacagatttcaccctcaccattagcagcctgcaaccggaagatattgccacttactactgccaacagggtaatacgcttccgtacacgttcggaggggggaccaagctggagatcacaggtggcggtggctcgggcggtggtgggtcgggtggcggcggatctcaggtgcagctgcaggagtcaggacctggcctggtgaaaccctcacagactctgtccgtgacatgcactgtctcaggggtctcattacccgactatggtgtaagctggattcgccagcctccaggtaagggtctggagtggctgggagtaatatggggtagtgaaaccacatactataattcagctctcaaatccagactgaccatctccaaggacaactccaagagccaagtttccttaaaattaagtagtgttactgctgctgacacagccgtctactactgtgccaaacattattactacggtggtagctatgctatggactactggggccaaggaacctcagtcaccgtctcctcaaccacgacgccagcgccgcgaccaccaacaccggcgcccaccatcgcgtcgcagcccctgtccctgcgcccagaggcgtgccggccagcggcggggggcgcagtgcacacgagggggctggacttcgcctgtgatatctacatctgggcgcccttggccgggacttgtggggtccttctcctgtcactggttatcaccctttactgccggagggaccagaggctgccccccgatgcccacaagccccctgggggaggcagtttccggacccccatccaagaggagcaggccgacgcccactccaccctggccaagatcagagtgaagttcagcaggagcgcagacgcccccgcgtaccagcagggccagaaccagctctataacgagctcaatctaggacgaagagaggagtacgatgttttggacaagagacgtggccgggaccctgagatggggggaaagccgagaaggaagaaccctcaggaaggcctgtacaatgaactgcagaaagataagatggcggaggcctacagtgagattgggatgaaaggcgagcgccggaggggcaaggggcacgatggcctttaccagggtctcagtacagccaccaaggacacctacgacgcccttcacatgcaggccctgccccctcgcggctctggcgagggaaggggttccctgcttacttgcggcgacgtcgaagagaatcccggtccgatggccctcccagtaactgccctccttttgcccctcgcactccttcttcatgccgctcgccccaactgggtcaacgtgattagcgatttgaagaaaatcgaggaccttatacagtctatgcatattgacgctacactgtatactgagagtgatgtacacccgtcctgtaaggtaacggccatgaaatgctttcttctggagctccaggtcatcagcttggagtctggggacgcaagcatccacgatacggttgaaaacctcatcatccttgcgaacaactctctctcatctaatggaaacgttacagagagtgggtgtaaggagtgcgaagagttggaagaaaaaaacatcaaagaatttcttcaatccttcgttcacatagtgcaaatgttcattaacacgtccactaccacacccgccccgaggccacctacgccggcaccgactatcgccagtcaacccctctctctgcgccccgaggcttgccggcctgcggctggtggggcggtccacacccggggcctggattttgcgtgcgatatatacatctgggcacctcttgccggcacctgcggagtgctgcttctctcactcgttattacgctgtactgctaagcggccgcgtcgac

SEQ ID NO: 188 - protein, 706 aa, synthetic construct
MALPVTALLLPLALLLHAARPDIQMTQSPSSLSASVGDRVTITCRASQDISKYLNWYQQKPGGTVKLLIYHTSRLHSGVPSRFSGSGSGTDFTLTISSLQPEDIATYYCQQGNTLPYTFGGGTKLEITGGGGSGGGGSGGGGSQVQLQESGPGLVKPSQTLSVTCTVSGVSLPDYGVSWIRQPPGKGLEWLGVIWGSETTYYNSALKSRLTISKDNSKSQVSLKLSSVTAADTAVYYCAKHYYYGGSYAMDYWGQGTSVTVSSTTTPAPRPPTPAPTIASQPLSLRPEACRPAAGGAVHTRGLDFACDIYIWAPLAGTCGVLLLSLVITLYCRRDQRLPPDAHKPPGGGSFRTPIQEEQADAHSTLAKIRVKFSRSADAPAYQQGQNQLYNELNLGRREEYDVLDKRRGRDPEMGGKPRRKNPQEGLYNELQKDKMAEAYSEIGMKGERRRGKGHDGLYQGLSTATKDTYDALHMQALPPRGSGEGRGSLLTCGDVEENPGPMALPVTALLLPLALLLHAARPNWVNVISDLKKIEDLIQSMHIDATLYTESDVHPSCKVTAMKCFLLELQVISLESGDASIHDTVENLIILANNSLSSNGNVTESGCKECEELEEKNIKEFLQSFVHIVQMFINTSTTTPAPRPPTPAPTIASQPLSLRPEACRPAAGGAVHTRGLDFACDIYIWAPLAGTCGVLLLSLVITLYC

SEQ ID NO: 189 - DNA, 2150 bp, synthetic construct
  source 1..2150: mol_type = other DNA
gaattcgccgccaccatggccttaccagtgaccgccttgctcctgccgctggccttgctgctccacgccgccaggccggacatccagatgacacagagcccgtcctccctgtctgcctctgtgggagacagagtcaccatcacctgcagggcaagtcaggacattagtaaatatttaaattggtatcagcagaaaccaggtggaactgttaaactcctgatctaccatacatcaagattacactcaggagtcccatcaaggttcagtggcagtgggtctggaacagatttcaccctcaccattagcagcctgcaaccggaagatattgccacttacttctgccaacagggtaatacgcttccgtacacgttcggaggggggaccaagctggagatcacaggtggcggtggctcgggcggtggtgggtcgggtggcggcggatctcaggtgcagctgcaggagtcaggacctggcctggtgaaaccctcacagactctgtccgtgacatgcactgtctcaggggtctcattacccgactatggtgtaagctggattcgccagcctccaggtaagggtctggagtggctgggagtaatatggggtagtgaaaccacatactataattcagctctcaaatccagactgaccatctccaaggacaactccaagagccaagtttccttaaaattaagtagtgttactgctgctgacacagccgtctactactgtgccaaacattattactacggtggtagctatgctatggactactggggccaaggaacctcagtcaccgtctcctcaaccacgacgccagcgccgcgaccaccaacaccggcgcccaccatcgcgtcgcagcccctgtccctgcgcccagaggcgtgccggccagcggcggggggcgcagtgcacacgagggggctggacttcgcctgtgatatctacatctgggcgcccttggccgggacttgtggggtccttctcctgtcactggttatcaccctttactgccggagggaccagaggctgccccccgatgcccacaagccccctgggggaggcagtttccggacccccatccaagaggagcaggccgacgcccactccaccctggccaagatcagagtgaagttcagcaggagcgcagacgcccccgcgtaccagcagggccagaaccagctctataacgagctcaatctaggacgaagagaggagtacgatgttttggacaagagacgtggccgggaccctgagatggggggaaagccgagaaggaagaaccctcaggaaggcctgtacaatgaactgcagaaagataagatggcggaggcctacagtgagattgggatgaaaggcgagcgccggaggggcaaggggcacgatggcctttaccagggtctcagtacagccaccaaggacacctacgacgcccttcacatgcaggccctgccccctcgcggctctggcgagggaaggggttccctgcttacttgcggcgacgtcgaagagaatcccggtccgatggccctcccagtaactgccctccttttgcccctcgcactccttcttcatgccgctcgccccaactgggtcaacgtgattagcgatttgaagaaaatcgaggaccttatacagtctatgcatattgacgctacactgtatactgagagtgatgtacacccgtcctgtaaggtaacggccatgaaatgctttcttctggagctccaggtcatcagcttggagtctggggacgcaagcatccacgatacggttgaaaacctcatcatccttgcgaacaactctctctcatctaatggaaacgttacagagagtgggtgtaaggagtgcgaagagttggaagaaaaaaacatcaaagaatttcttcaatccttcgttcacatagtgcaaatgttcattaacacgtccactaccacacccgccccgaggccacctacgccggcaccgactatcgccagtcaacccctctctctgcgccccgaggcttgccggcctgcggctggtggggcggtccacacccggggcctggattttgcgtgcgatatatacatctgggcacctcttgccggcacctgcggagtgctgcttctctcactcgttattacgctgtactgctaagcggccgcgtcgac

SEQ ID NO: 190 - protein, 706 aa, synthetic construct
MALPVTALLLPLALLLHAARPDIQMTQSPSSLSASVGDRVTITCRASQDISKYLNWYQQKPGGTVKLLIYHTSRLHSGVPSRFSGSGSGTDFTLTISSLQPEDIATYFCQQGNTLPYTFGGGTKLEITGGGGSGGGGSGGGGSQVQLQESGPGLVKPSQTLSVTCTVSGVSLPDYGVSWIRQPPGKGLEWLGVIWGSETTYYNSALKSRLTISKDNSKSQVSLKLSSVTAADTAVYYCAKHYYYGGSYAMDYWGQGTSVTVSSTTTPAPRPPTPAPTIASQPLSLRPEACRPAAGGAVHTRGLDFACDIYIWAPLAGTCGVLLLSLVITLYCRRDQRLPPDAHKPPGGGSFRTPIQEEQADAHSTLAKIRVKFSRSADAPAYQQGQNQLYNELNLGRREEYDVLDKRRGRDPEMGGKPRRKNPQEGLYNELQKDKMAEAYSEIGMKGERRRGKGHDGLYQGLSTATKDTYDALHMQALPPRGSGEGRGSLLTCGDVEENPGPMALPVTALLLPLALLLHAARPNWVNVISDLKKIEDLIQSMHIDATLYTESDVHPSCKVTAMKCFLLELQVISLESGDASIHDTVENLIILANNSLSSNGNVTESGCKECEELEEKNIKEFLQSFVHIVQMFINTSTTTPAPRPPTPAPTIASQPLSLRPEACRPAAGGAVHTRGLDFACDIYIWAPLAGTCGVLLLSLVITLYC

SEQ ID NO: 191 - DNA, 2150 bp, synthetic construct
  source 1..2150: mol_type = other DNA
gaattcgccgccaccatggccttaccagtgaccgccttgctcctgccgctggccttgctgctccacgccgccaggccggacatccagatgacacagagcccgtcctccctgtctgcctctgtgggagacagagtcaccatcacctgcagggcaagtcaggacattagtaaatatttaaattggtatcagcagaaaccagacggaactgttaaactcctgatctaccatacatcaagattacactcaggagtcccatcaaggttcagtggcagtgggtctggaacagattacaccctcaccattagcagcctgcaaccggaagatattgccacttacttctgccaacagggtaatacgcttccgtacacgttcggaggggggaccaagctggagatcacaggtggcggtggctcgggcggtggtgggtcgggtggcggcggatctcaggtgcagctgcaggagtcaggacctggcctggtgaaaccctcacagactctgtccgtgacatgcactgtctcaggggtctcattacccgactatggtgtaagctggattcgccagcctccaggtaagggtctggagtggctgggagtaatatggggtagtgaaaccacatactataattcagctctcaaatccagactgaccatctccaaggacaactccaagagccaagtttccttaaaattaagtagtgttactgctgctgacacagccgtctactactgtgccaaacattattactacggtggtagctatgctatggactactggggccaaggaacctcagtcaccgtctcctcaaccacgacgccagcgccgcgaccaccaacaccggcgcccaccatcgcgtcgcagcccctgtccctgcgcccagaggcgtgccggccagcggcggggggcgcagtgcacacgagggggctggacttcgcctgtgatatctacatctgggcgcccttggccgggacttgtggggtccttctcctgtcactggttatcaccctttactgccggagggaccagaggctgccccccgatgcccacaagccccctgggggaggcagtttccggacccccatccaagaggagcaggccgacgcccactccaccctggccaagatcagagtgaagttcagcaggagcgcagacgcccccgcgtaccagcagggccagaaccagctctataacgagctcaatctaggacgaagagaggagtacgatgttttggacaagagacgtggccgggaccctgagatggggggaaagccgagaaggaagaaccctcaggaaggcctgtacaatgaactgcagaaagataagatggcggaggcctacagtgagattgggatgaaaggcgagcgccggaggggcaaggggcacgatggcctttaccagggtctcagtacagccaccaaggacacctacgacgcccttcacatgcaggccctgccccctcgcggctctggcgagggaaggggttccctgcttacttgcggcgacgtcgaagagaatcccggtccgatggccctcccagtaactgccctccttttgcccctcgcactccttcttcatgccgctcgccccaactgggtcaacgtgattagcgatttgaagaaaatcgaggaccttatacagtctatgcatattgacgctacactgtatactgagagtgatgtacacccgtcctgtaaggtaacggccatgaaatgctttcttctggagctccaggtcatcagcttggagtctggggacgcaagcatccacgatacggttgaaaacctcatcatccttgcgaacaactctctctcatctaatggaaacgttacagagagtgggtgtaaggagtgcgaagagttggaagaaaaaaacatcaaagaatttcttcaatccttcgttcacatagtgcaaatgttcattaacacgtccactaccacacccgccccgaggccacctacgccggcaccgactatcgccagtcaacccctctctctgcgccccgaggcttgccggcctgcggctggtggggcggtccacacccggggcctggattttgcgtgcgatatatacatctgggcacctcttgccggcacctgcggagtgctgcttctctcactcgttattacgctgtactgctaagcggccgcgtcgac

SEQ ID NO: 192 - protein, 706 aa, synthetic construct
MALPVTALLLPLALLLHAARPDIQMTQSPSSLSASVGDRVTITCRASQDISKYLNWYQQKPDGTVKLLIYHTSRLHSGVPSRFSGSGSGTDYTLTISSLQPEDIATYFCQQGNTLPYTFGGGTKLEITGGGGSGGGGSGGGGSQVQLQESGPGLVKPSQTLSVTCTVSGVSLPDYGVSWIRQPPGKGLEWLGVIWGSETTYYNSALKSRLTISKDNSKSQVSLKLSSVTAADTAVYYCAKHYYYGGSYAMDYWGQGTSVTVSSTTTPAPRPPTPAPTIASQPLSLRPEACRPAAGGAVHTRGLDFACDIYIWAPLAGTCGVLLLSLVITLYCRRDQRLPPDAHKPPGGGSFRTPIQEEQADAHSTLAKIRVKFSRSADAPAYQQGQNQLYNELNLGRREEYDVLDKRRGRDPEMGGKPRRKNPQEGLYNELQKDKMAEAYSEIGMKGERRRGKGHDGLYQGLSTATKDTYDALHMQALPPRGSGEGRGSLLTCGDVEENPGPMALPVTALLLPLALLLHAARPNWVNVISDLKKIEDLIQSMHIDATLYTESDVHPSCKVTAMKCFLLELQVISLESGDASIHDTVENLIILANNSLSSNGNVTESGCKECEELEEKNIKEFLQSFVHIVQMFINTSTTTPAPRPPTPAPTIASQPLSLRPEACRPAAGGAVHTRGLDFACDIYIWAPLAGTCGVLLLSLVITLYC

SEQ ID NO: 193 - DNA, 2150 bp, synthetic construct
  source 1..2150: mol_type = other DNA
gaattcgccgccaccatggccttaccagtgaccgccttgctcctgccgctggccttgctgctccacgccgccaggccggatattcagatgacccagagcccgagcagcctgagcgcgagcgtgggcgatcgcgtgaccattacctgccgcgcgagccaggatattagcaaatatctgaactggtatcagcagaaaccgggcggcaccgtgaaactgctgatttatcataccagccgcctgcatagcggcgtgccgagccgctttagcggcagcggcagcggcaccgattttaccctgaccattagcagcctgcagccggaagatattgcgacctattattgccagcagggcaacaccctgccgtatacctttggcggcggcaccaaactggaaattaccggtggcggtggctcgggcggtggtgggtcgggtggcggcggatctcaggtgcagctgcaggaaagcggcccgggcctggtgaaaccgagccagaccctgagcgtgacctgcaccgtgagcggcgtgagcctgccggattatggcgtgagctggattcgccagccgccgcgcaaaggcctggaatggctgggcgtgatttggggcagcgaaaccacctattataacagcgcgctgaaaagccgcctgaccattagcaaagataacagcaaaagccaggtgagcctgaaaatgagcagcgtgaccgcggcggataccgcgatttattattgcgcgaaacattattattatggcggcagctatgcgatggattattggggccagggcaccagcgtgaccgtgagcagcaccacgacgccagcgccgcgaccaccaacaccggcgcccaccatcgcgtcgcagcccctgtccctgcgcccagaggcgtgccggccagcggcggggggcgcagtgcacacgagggggctggacttcgcctgtgatatctacatctgggcgcccttggccgggacttgtggggtccttctcctgtcactggttatcaccctttactgccggagggaccagaggctgccccccgatgcccacaagccccctgggggaggcagtttccggacccccatccaagaggagcaggccgacgcccactccaccctggccaagatcagagtgaagttcagcaggagcgcagacgcccccgcgtaccagcagggccagaaccagctctataacgagctcaatctaggacgaagagaggagtacgatgttttggacaagagacgtggccgggaccctgagatggggggaaagccgagaaggaagaaccctcaggaaggcctgtacaatgaactgcagaaagataagatggcggaggcctacagtgagattgggatgaaaggcgagcgccggaggggcaaggggcacgatggcctttaccagggtctcagtacagccaccaaggacacctacgacgcccttcacatgcaggccctgccccctcgcggctctggcgagggaaggggttccctgcttacttgcggcgacgtcgaagagaatcccggtccgatggccctcccagtaactgccctccttttgcccctcgcactccttcttcatgccgctcgccccaactgggtcaacgtgattagcgatttgaagaaaatcgaggaccttatacagtctatgcatattgacgctacactgtatactgagagtgatgtacacccgtcctgtaaggtaacggccatgaaatgctttcttctggagctccaggtcatcagcttggagtctggggacgcaagcatccacgatacggttgaaaacctcatcatccttgcgaacaactctctctcatctaatggaaacgttacagagagtgggtgtaaggagtgcgaagagttggaagaaaaaaacatcaaagaatttcttcaatccttcgttcacatagtgcaaatgttcattaacacgtccactaccacacccgccccgaggccacctacgccggcaccgactatcgccagtcaacccctctctctgcgccccgaggcttgccggcctgcggctggtggggcggtccacacccggggcctggattttgcgtgcgatatatacatctgggcacctcttgccggcacctgcggagtgctgcttctctcactcgttattacgctgtactgctaagcggccgcgtcgac

SEQ ID NO: 194 - protein, 706 aa, synthetic construct
MALPVTALLLPLALLLHAARPDIQMTQSPSSLSASVGDRVTITCRASQDISKYLNWYQQKPGGTVKLLIYHTSRLHSGVPSRFSGSGSGTDFTLTISSLQPEDIATYYCQQGNTLPYTFGGGTKLEITGGGGSGGGGSGGGGSQVQLQESGPGLVKPSQTLSVTCTVSGVSLPDYGVSWIRQPPRKGLEWLGVIWGSETTYYNSALKSRLTISKDNSKSQVSLKMSSVTAADTAIYYCAKHYYYGGSYAMDYWGQGTSVTVSSTTTPAPRPPTPAPTIASQPLSLRPEACRPAAGGAVHTRGLDFACDIYIWAPLAGTCGVLLLSLVITLYCRRDQRLPPDAHKPPGGGSFRTPIQEEQADAHSTLAKIRVKFSRSADAPAYQQGQNQLYNELNLGRREEYDVLDKRRGRDPEMGGKPRRKNPQEGLYNELQKDKMAEAYSEIGMKGERRRGKGHDGLYQGLSTATKDTYDALHMQALPPRGSGEGRGSLLTCGDVEENPGPMALPVTALLLPLALLLHAARPNWVNVISDLKKIEDLIQSMHIDATLYTESDVHPSCKVTAMKCFLLELQVISLESGDASIHDTVENLIILANNSLSSNGNVTESGCKECEELEEKNIKEFLQSFVHIVQMFINTSTTTPAPRPPTPAPTIASQPLSLRPEACRPAAGGAVHTRGLDFACDIYIWAPLAGTCGVLLLSLVITLYC

SEQ ID NO: 195 - DNA, 2150 bp, synthetic construct
  source 1..2150: mol_type = other DNA
gaattcgccgccaccatggccttaccagtgaccgccttgctcctgccgctggccttgctgctccacgccgccaggccggatattcagatgacccagagcccgagcagcctgagcgcgagcgtgggcgatcgcgtgaccattacctgccgcgcgagccaggatattagcaaatatctgaactggtatcagcagaaaccgggcggcaccgtgaaactgctgatttatcataccagccgcctgcatagcggcgtgccgagccgctttagcggcagcggcagcggcaccgattttaccctgaccattagcagcctgcagccggaagatattgcgacctatttttgccagcagggcaacaccctgccgtatacctttggcggcggcaccaaactggaaattaccggtggcggtggctcgggcggtggtgggtcgggtggcggcggatctcaggtgcagctgcaggaaagcggcccgggcctggtgaaaccgagccagaccctgagcgtgacctgcaccgtgagcggcgtgagcctgccggattatggcgtgagctggattcgccagccgccgcgcaaaggcctggaatggctgggcgtgatttggggcagcgaaaccacctattataacagcgcgctgaaaagccgcctgaccattagcaaagataacagcaaaagccaggtgagcctgaaaatgagcagcgtgaccgcggcggataccgcgatttattattgcgcgaaacattattattatggcggcagctatgcgatggattattggggccagggcaccagcgtgaccgtgagcagcaccacgacgccagcgccgcgaccaccaacaccggcgcccaccatcgcgtcgcagcccctgtccctgcgcccagaggcgtgccggccagcggcggggggcgcagtgcacacgagggggctggacttcgcctgtgatatctacatctgggcgcccttggccgggacttgtggggtccttctcctgtcactggttatcaccctttactgccggagggaccagaggctgccccccgatgcccacaagccccctgggggaggcagtttccggacccccatccaagaggagcaggccgacgcccactccaccctggccaagatcagagtgaagttcagcaggagcgcagacgcccccgcgtaccagcagggccagaaccagctctataacgagctcaatctaggacgaagagaggagtacgatgttttggacaagagacgtggccgggaccctgagatggggggaaagccgagaaggaagaaccctcaggaaggcctgtacaatgaactgcagaaagataagatggcggaggcctacagtgagattgggatgaaaggcgagcgccggaggggcaaggggcacgatggcctttaccagggtctcagtacagccaccaaggacacctacgacgcccttcacatgcaggccctgccccctcgcggctctggcgagggaaggggttccctgcttacttgcggcgacgtcgaagagaatcccggtccgatggccctcccagtaactgccctccttttgcccctcgcactccttcttcatgccgctcgccccaactgggtcaacgtgattagcgatttgaagaaaatcgaggaccttatacagtctatgcatattgacgctacactgtatactgagagtgatgtacacccgtcctgtaaggtaacggccatgaaatgctttcttctggagctccaggtcatcagcttggagtctggggacgcaagcatccacgatacggttgaaaacctcatcatccttgcgaacaactctctctcatctaatggaaacgttacagagagtgggtgtaaggagtgcgaagagttggaagaaaaaaacatcaaagaatttcttcaatccttcgttcacatagtgcaaatgttcattaacacgtccactaccacacccgccccgaggccacctacgccggcaccgactatcgccagtcaacccctctctctgcgccccgaggcttgccggcctgcggctggtggggcggtccacacccggggcctggattttgcgtgcgatatatacatctgggcacctcttgccggcacctgcggagtgctgcttctctcactcgttattacgctgtactgctaagcggccgcgtcgac

SEQ ID NO: 196 - protein, 706 aa, synthetic construct
MALPVTALLLPLALLLHAARPDIQMTQSPSSLSASVGDRVTITCRASQDISKYLNWYQQKPGGTVKLLIYHTSRLHSGVPSRFSGSGSGTDFTLTISSLQPEDIATYFCQQGNTLPYTFGGGTKLEITGGGGSGGGGSGGGGSQVQLQESGPGLVKPSQTLSVTCTVSGVSLPDYGVSWIRQPPRKGLEWLGVIWGSETTYYNSALKSRLTISKDNSKSQVSLKMSSVTAADTAIYYCAKHYYYGGSYAMDYWGQGTSVTVSSTTTPAPRPPTPAPTIASQPLSLRPEACRPAAGGAVHTRGLDFACDIYIWAPLAGTCGVLLLSLVITLYCRRDQRLPPDAHKPPGGGSFRTPIQEEQADAHSTLAKIRVKFSRSADAPAYQQGQNQLYNELNLGRREEYDVLDKRRGRDPEMGGKPRRKNPQEGLYNELQKDKMAEAYSEIGMKGERRRGKGHDGLYQGLSTATKDTYDALHMQALPPRGSGEGRGSLLTCGDVEENPGPMALPVTALLLPLALLLHAARPNWVNVISDLKKIEDLIQSMHIDATLYTESDVHPSCKVTAMKCFLLELQVISLESGDASIHDTVENLIILANNSLSSNGNVTESGCKECEELEEKNIKEFLQSFVHIVQMFINTSTTTPAPRPPTPAPTIASQPLSLRPEACRPAAGGAVHTRGLDFACDIYIWAPLAGTCGVLLLSLVITLYC

SEQ ID NO: 197 - DNA, 2150 bp, synthetic construct
  source 1..2150: mol_type = other DNA
gaattcgccgccaccatggccttaccagtgaccgccttgctcctgccgctggccttgctgctccacgccgccaggccggatattcagatgacccagagcccgagcagcctgagcgcgagcgtgggcgatcgcgtgaccattacctgccgcgcgagccaggatattagcaaatatctgaactggtatcagcagaaaccggatggcaccgtgaaactgctgatttatcataccagccgcctgcatagcggcgtgccgagccgctttagcggcagcggcagcggcaccgattataccctgaccattagcagcctgcagccggaagatattgcgacctatttttgccagcagggcaacaccctgccgtatacctttggcggcggcaccaaactggaaattaccggtggcggtggctcgggcggtggtgggtcgggtggcggcggatctcaggtgcagctgcaggaaagcggcccgggcctggtgaaaccgagccagaccctgagcgtgacctgcaccgtgagcggcgtgagcctgccggattatggcgtgagctggattcgccagccgccgcgcaaaggcctggaatggctgggcgtgatttggggcagcgaaaccacctattataacagcgcgctgaaaagccgcctgaccattagcaaagataacagcaaaagccaggtgagcctgaaaatgagcagcgtgaccgcggcggataccgcgatttattattgcgcgaaacattattattatggcggcagctatgcgatggattattggggccagggcaccagcgtgaccgtgagcagcaccacgacgccagcgccgcgaccaccaacaccggcgcccaccatcgcgtcgcagcccctgtccctgcgcccagaggcgtgccggccagcggcggggggcgcagtgcacacgagggggctggacttcgcctgtgatatctacatctgggcgcccttggccgggacttgtggggtccttctcctgtcactggttatcaccctttactgccggagggaccagaggctgccccccgatgcccacaagccccctgggggaggcagtttccggacccccatccaagaggagcaggccgacgcccactccaccctggccaagatcagagtgaagttcagcaggagcgcagacgcccccgcgtaccagcagggccagaaccagctctataacgagctcaatctaggacgaagagaggagtacgatgttttggacaagagacgtggccgggaccctgagatggggggaaagccgagaaggaagaaccctcaggaaggcctgtacaatgaactgcagaaagataagatggcggaggcctacagtgagattgggatgaaaggcgagcgccggaggggcaaggggcacgatggcctttaccagggtctcagtacagccaccaaggacacctacgacgcccttcacatgcaggccctgccccctcgcggctctggcgagggaaggggttccctgcttacttgcggcgacgtcgaagagaatcccggtccgatggccctcccagtaactgccctccttttgcccctcgcactccttcttcatgccgctcgccccaactgggtcaacgtgattagcgatttgaagaaaatcgaggaccttatacagtctatgcatattgacgctacactgtatactgagagtgatgtacacccgtcctgtaaggtaacggccatgaaatgctttcttctggagctccaggtcatcagcttggagtctggggacgcaagcatccacgatacggttgaaaacctcatcatccttgcgaacaactctctctcatctaatggaaacgttacagagagtgggtgtaaggagtgcgaagagttggaagaaaaaaacatcaaagaatttcttcaatccttcgttcacatagtgcaaatgttcattaacacgtccactaccacacccgccccgaggccacctacgccggcaccgactatcgccagtcaacccctctctctgcgccccgaggcttgccggcctgcggctggtggggcggtccacacccggggcctggattttgcgtgcgatatatacatctgggcacctcttgccggcacctgcggagtgctgcttctctcactcgttattacgctgtactgctaagcggccgcgtcgac

SEQ ID NO: 198 - protein, 706 aa, synthetic construct
MALPVTALLLPLALLLHAARPDIQMTQSPSSLSASVGDRVTITCRASQDISKYLNWYQQKPDGTVKLLIYHTSRLHSGVPSRFSGSGSGTDYTLTISSLQPEDIATYFCQQGNTLPYTFGGGTKLEITGGGGSGGGGSGGGGSQVQLQESGPGLVKPSQTLSVTCTVSGVSLPDYGVSWIRQPPRKGLEWLGVIWGSETTYYNSALKSRLTISKDNSKSQVSLKMSSVTAADTAIYYCAKHYYYGGSYAMDYWGQGTSVTVSSTTTPAPRPPTPAPTIASQPLSLRPEACRPAAGGAVHTRGLDFACDIYIWAPLAGTCGVLLLSLVITLYCRRDQRLPPDAHKPPGGGSFRTPIQEEQADAHSTLAKIRVKFSRSADAPAYQQGQNQLYNELNLGRREEYDVLDKRRGRDPEMGGKPRRKNPQEGLYNELQKDKMAEAYSEIGMKGERRRGKGHDGLYQGLSTATKDTYDALHMQALPPRGSGEGRGSLLTCGDVEENPGPMALPVTALLLPLALLLHAARPNWVNVISDLKKIEDLIQSMHIDATLYTESDVHPSCKVTAMKCFLLELQVISLESGDASIHDTVENLIILANNSLSSNGNVTESGCKECEELEEKNIKEFLQSFVHIVQMFINTSTTTPAPRPPTPAPTIASQPLSLRPEACRPAAGGAVHTRGLDFACDIYIWAPLAGTCGVLLLSLVITLYC

SEQ ID NO: 199 - protein, 17 aa, synthetic construct
LQNRRGLDLLFLKEGGL

SEQ ID NO: 200 - protein, 27 aa, synthetic construct
LQNRRGLDLLFLKEGGLCAALKEECCF

SEQ ID NO: 201 - protein, 27 aa, synthetic construct
LQNRRGLDLLFLKEGGLCAALKEECCF

SEQ ID NO: 202 - protein, 27 aa, synthetic construct
LQNRRGLDLLFLKEGGLCAALKEECCF

SEQ ID NO: 203 - protein, 27 aa, synthetic construct
LQNRRGLDLLFLKEGGLCAALKEECCF

SEQ ID NO: 204 - protein, 27 aa, synthetic construct
LQNRRGLDLLFLKEGGLCAALKEECCF

SEQ ID NO: 205 - protein, 27 aa, synthetic construct
LQNRRGLDLLFLKEGGLCAALKEECCF

SEQ ID NO: 206 - protein, 27 aa, synthetic construct
LQNRRGLDLLFLQEGGLCAALKEECCF

SEQ ID NO: 207 - protein, 27 aa, synthetic construct
LQNRRGLDLLTAEQGGICLALQEKCCF

SEQ ID NO: 208 - protein, 27 aa, synthetic construct
LQNRRGLDLLTAEQGGICLALQEKCCF

SEQ ID NO: 209 - protein, 27 aa, synthetic construct
AQNRRGLDLLFWEQGGLCKALQEQCRF

SEQ ID NO: 210 - protein, 27 aa, synthetic construct
AQNRRGLDLLFWEQGGLCKAIQEQCCF

SEQ ID NO: 211 - protein, 19 aa, synthetic construct
MTYKAAVDLSHFLKEKGGL

SEQ ID NO: 212 - protein, 17 aa, synthetic construct
LQARVLAVERYLKDQQL

SEQ ID NO: 213 - protein, 17 aa, synthetic construct
LQNKRGLDLLFLXXGGL

SEQ ID NO: 214 - protein, 17 aa, synthetic construct
LQNRRGLDLLTAEQGGX

SEQ ID NO: 215 - protein, 16 aa, synthetic construct
XQNRXXLXXXAXXXGX

SEQ ID NO: 216 - DNA, 51 bp, synthetic construct
  source 1..51: mol_type = other DNA
ctgcaaaacagaaggggattagacctgctttttcttaaagagggagggctc

SEQ ID NO: 217 - DNA, 1593 bp, synthetic construct
  source 1..1593: mol_type = other DNA
atggcactccccgtaactgctctgctgctgccgttggcattgctcctgcacgccgcacgcccgctgcaaaacagaaggggattagacctgctttttcttaaagagggagggctcaccacgacgccagcgccgcgaccaccaacaccggcgcccaccatcgcgtcgcagcccctgtccctgcgcccagaggcgtgccggccagcggcggggggcgcagtgcacacgagggggctggacttcgcctgtgatatctacatctgggcgcccttggccgggacttgtggggtccttctcctgtcactggttatcaccctttactgcacgttactggccgaagccgcttggaataaggccggtgtgcgtttgtctatatgttattttccaccatattgccgtcttttggcaatgtgagggcccggaaacctggccctgtcttcttgacgagcattcctaggggtctttcccctctcgccaaaggaatgcaaggtctgttgaatgtcgtgaaggaagcagttcctctggaagcttcttgaagacaaacaacgtctgtagcgaccctttgcaggcagcggaaccccccacctggcgacaggtgcctctgcggccaaaagccacgtgtataagatacacctgcaaaggcggcacaaccccagtgccacgttgtgagttggatagttgtggaaagagtcaaatggctctcctcaagcgtattcaacaaggggctgaaggatgcccagaaggtaccccattgtatgggatctgatctggggcctcggtgcacatgctttacatgtgtttagtcgaggttaaaaaaacgtctaggccccccgaaccacggggacgtggttttcctttgaaaaacacgataataccatggtgagcaagggcgaggagctgttcaccggggtggtgcccatcctggtcgagctggacggcgacgtaaacggccacaagttcagcgtgtccggcgagggcgagggcgatgccacctacggcaagctgaccctgaagttcatctgcaccaccggcaagctgcccgtgccctggcccaccctcgtgaccaccctgacctacggcgtgcagtgcttcagccgctaccccgaccacatgaagcagcacgacttcttcaagtccgccatgcccgaaggctacgtccaggagcgcaccatcttcttcaaggacgacggcaactacaagacccgcgccgaggtgaagttcgagggcgacaccctggtgaaccgcatcgagctgaagggcatcgacttcaaggaggacggcaacatcctggggcacaagctggagtacaactacaacagccacaacgtctatatcatggccgacaagcagaagaacggcatcaaggtgaacttcaagatccgccacaacatcgaggacggcagcgtgcagctcgccgaccactaccagcagaacacccccatcggcgacggccccgtgctgctgcccgacaaccactacctgagcacccagtccgccctgagcaaagaccccaacgagaagcgcgatcacatggtcctgctggagttcgtgaccgccgccgggatcactctcggcatggacgagctgtacaagtaa

SEQ ID NO: 218 - protein, 107 aa, synthetic construct
MALPVTALLLPLALLLHAARPLQNRRGLDLLFLKEGGLTTTPAPRPPTPAPTIASQPLSLRPEACRPAAGGAVHTRGLDFACDIYIWAPLAGTCGVLLLSLVITLYC

SEQ ID NO: 219 - DNA, 321 bp, synthetic construct
  source 1..321: mol_type = other DNA
atggcactccccgtaactgctctgctgctgccgttggcattgctcctgcacgccgcacgcccgctgcaaaacagaaggggattagacctgctttttcttaaagagggagggctcaccacgacgccagcgccgcgaccaccaacaccggcgcccaccatcgcgtcgcagcccctgtccctgcgcccagaggcgtgccggccagcggcggggggcgcagtgcacacgagggggctggacttcgcctgtgatatctacatctgggcgcccttggccgggacttgtggggtccttctcctgtcactggttatcaccctttactgc

SEQ ID NO: 220 - protein, 28 aa, synthetic construct
LQNRRGLDLLFLKEGGLCAALKEECCFY

SEQ ID NO: 221 - DNA, 84 bp, synthetic construct
  source 1..84: mol_type = other DNA
ctgcaaaacagaaggggattagacctgctttttcttaaagagggagggctctgtgctgccttaaaggaagaatgttgcttttat

SEQ ID NO: 222 - DNA, 1626 bp, synthetic construct
  source 1..1626: mol_type = other DNA
atggcactccccgtaactgctctgctgctgccgttggcattgctcctgcacgccgcacgcccgctgcaaaacagaaggggattagacctgctttttcttaaagagggagggctctgtgctgccttaaaggaagaatgttgcttttataccacgacgccagcgccgcgaccaccaacaccggcgcccaccatcgcgtcgcagcccctgtccctgcgcccagaggcgtgccggccagcggcggggggcgcagtgcacacgagggggctggacttcgcctgtgatatctacatctgggcgcccttggccgggacttgtggggtccttctcctgtcactggttatcaccctttactgcacgttactggccgaagccgcttggaataaggccggtgtgcgtttgtctatatgttattttccaccatattgccgtcttttggcaatgtgagggcccggaaacctggccctgtcttcttgacgagcattcctaggggtctttcccctctcgccaaaggaatgcaaggtctgttgaatgtcgtgaaggaagcagttcctctggaagcttcttgaagacaaacaacgtctgtagcgaccctttgcaggcagcggaaccccccacctggcgacaggtgcctctgcggccaaaagccacgtgtataagatacacctgcaaaggcggcacaaccccagtgccacgttgtgagttggatagttgtggaaagagtcaaatggctctcctcaagcgtattcaacaaggggctgaaggatgcccagaaggtaccccattgtatgggatctgatctggggcctcggtgcacatgctttacatgtgtttagtcgaggttaaaaaaacgtctaggccccccgaaccacggggacgtggttttcctttgaaaaacacgataataccatggtgagcaagggcgaggagctgttcaccggggtggtgcccatcctggtcgagctggacggcgacgtaaacggccacaagttcagcgtgtccggcgagggcgagggcgatgccacctacggcaagctgaccctgaagttcatctgcaccaccggcaagctgcccgtgccctggcccaccctcgtgaccaccctgacctacggcgtgcagtgcttcagccgctaccccgaccacatgaagcagcacgacttcttcaagtccgccatgcccgaaggctacgtccaggagcgcaccatcttcttcaaggacgacggcaactacaagacccgcgccgaggtgaagttcgagggcgacaccctggtgaaccgcatcgagctgaagggcatcgacttcaaggaggacggcaacatcctggggcacaagctggagtacaactacaacagccacaacgtctatatcatggccgacaagcagaagaacggcatcaaggtgaacttcaagatccgccacaacatcgaggacggcagcgtgcagctcgccgaccactaccagcagaacacccccatcggcgacggccccgtgctgctgcccgacaaccactacctgagcacccagtccgccctgagcaaagaccccaacgagaagcgcgatcacatggtcctgctggagttcgtgaccgccgccgggatcactctcggcatggacgagctgtacaagtaa

SEQ ID NO: 223 - protein, 117 aa, synthetic construct
MALPVTALLLPLALLLHAARPLQNRRGLDLLFLKEGGLCAALKEECCFTTTPAPRPPTPAPTIASQPLSLRPEACRPAAGGAVHTRGLDFACDIYIWAPLAGTCGVLLLSLVITLYC

SEQ ID NO: 224 - DNA, 354 bp, synthetic construct
  source 1..354: mol_type = other DNA
atggcactccccgtaactgctctgctgctgccgttggcattgctcctgcacgccgcacgcccgctgcaaaacagaaggggattagacctgctttttcttaaagagggagggctctgtgctgccttaaaggaagaatgttgcttttataccacgacgccagcgccgcgaccaccaacaccggcgcccaccatcgcgtcgcagcccctgtccctgcgcccagaggcgtgccggccagcggcggggggcgcagtgcacacgagggggctggacttcgcctgtgatatctacatctgggcgcccttggccgggacttgtggggtccttctcctgtcactggttatcaccctttactgc

SEQ ID NO: 225 - protein, 28 aa, synthetic construct
AQNRRGLDLLFWEQGGLCKALQEQCRFP

SEQ ID NO: 226 - DNA, 84 bp, synthetic construct
  source 1..84: mol_type = other DNA
gcccagaacagacgaggccttgatctcctattctgggagcaaggaggattatgcaaagcattacaagaacagtgccgttttccg

SEQ ID NO: 227 - DNA, 1626 bp, synthetic construct
  source 1..1626: mol_type = other DNA
atggcactccccgtaactgctctgctgctgccgttggcattgctcctgcacgccgcacgcccggcccagaacagacgaggccttgatctcctattctgggagcaaggaggattatgcaaagcattacaagaacagtgccgttttccgaccacgacgccagcgccgcgaccaccaacaccggcgcccaccatcgcgtcgcagcccctgtccctgcgcccagaggcgtgccggccagcggcggggggcgcagtgcacacgagggggctggacttcgcctgtgatatctacatctgggcgcccttggccgggacttgtggggtccttctcctgtcactggttatcaccctttactgcacgttactggccgaagccgcttggaataaggccggtgtgcgtttgtctatatgttattttccaccatattgccgtcttttggcaatgtgagggcccggaaacctggccctgtcttcttgacgagcattcctaggggtctttcccctctcgccaaaggaatgcaaggtctgttgaatgtcgtgaaggaagcagttcctctggaagcttcttgaagacaaacaacgtctgtagcgaccctttgcaggcagcggaaccccccacctggcgacaggtgcctctgcggccaaaagccacgtgtataagatacacctgcaaaggcggcacaaccccagtgccacgttgtgagttggatagttgtggaaagagtcaaatggctctcctcaagcgtattcaacaaggggctgaaggatgcccagaaggtaccccattgtatgggatctgatctggggcctcggtgcacatgctttacatgtgtttagtcgaggttaaaaaaacgtctaggccccccgaaccacggggacgtggttttcctttgaaaaacacgataataccatggtgagcaagggcgaggagctgttcaccggggtggtgcccatcctggtcgagctggacggcgacgtaaacggccacaagttcagcgtgtccggcgagggcgagggcgatgccacctacggcaagctgaccctgaagttcatctgcaccaccggcaagctgcccgtgccctggcccaccctcgtgaccaccctgacctacggcgtgcagtgcttcagccgctaccccgaccacatgaagcagcacgacttcttcaagtccgccatgcccgaaggctacgtccaggagcgcaccatcttcttcaaggacgacggcaactacaagacccgcgccgaggtgaagttcgagggcgacaccctggtgaaccgcatcgagctgaagggcatcgacttcaaggaggacggcaacatcctggggcacaagctggagtacaactacaacagccacaacgtctatatcatggccgacaagcagaagaacggcatcaaggtgaacttcaagatccgccacaacatcgaggacggcagcgtgcagctcgccgaccactaccagcagaacacccccatcggcgacggccccgtgctgctgcccgacaaccactacctgagcacccagtccgccctgagcaaagaccccaacgagaagcgcgatcacatggtcctgctggagttcgtgaccgccgccgggatcactctcggcatggacgagctgtacaagtaa

SEQ ID NO: 228 - protein, 104 aa, synthetic construct
MALPVTALLLPLALLLHAARPAQNRRGLDLLFWEQTTTPAPRPPTPAPTIASQPLSLRPEACRPAAGGAVHTRGLDFACDIYIWAPLAGTCGVLLLSLVITLYC

SEQ ID NO: 229 - DNA, 354 bp, synthetic construct
  source 1..354: mol_type = other DNA
atggcactccccgtaactgctctgctgctgccgttggcattgctcctgcacgccgcacgcccggcccagaacagacgaggccttgatctcctattctgggagcaaggaggattatgcaaagcattacaagaacagtgccgttttccgaccacgacgccagcgccgcgaccaccaacaccggcgcccaccatcgcgtcgcagcccctgtccctgcgcccagaggcgtgccggccagcggcggggggcgcagtgcacacgagggggctggacttcgcctgtgatatctacatctgggcgcccttggccgggacttgtggggtccttctcctgtcactggttatcaccctttactgc

SEQ ID NO: 230 - protein, 75 aa, synthetic construct
GALFLGFLGAAGSTMGAASVTLTVQARQLLSGIVQQQSNLLRAIEAQQHMLQLTVWGIKQLQARVLAVERYLKDQ

SEQ ID NO: 231 - DNA, 225 bp, synthetic construct
  source 1..225: mol_type = other DNA
ggagctttrttccttgggttcttgggagcagcaggaagcactatgggcgcagcgtcagtgacgctgacggtacaggccagacaattaytgtctggtatagtgcarcagcagagcaatttgctgagagctattgaggcgcaacagcatatgttgcaactcacagtctggggcatyaaacagctccaggcaagagtcctggctgtggaaagatacctaaaggatcaa

SEQ ID NO: 232 - DNA, 1767 bp, synthetic construct
  source 1..1767: mol_type = other DNA
atggcactccccgtaactgctctgctgctgccgttggcattgctcctgcacgccgcacgcccgggagctttrttccttgggttcttgggagcagcaggaagcactatgggcgcagcgtcagtgacgctgacggtacaggccagacaattaytgtctggtatagtgcarcagcagagcaatttgctgagagctattgaggcgcaacagcatatgttgcaactcacagtctggggcatyaaacagctccaggcaagagtcctggctgtggaaagatacctaaaggatcaaaccacgacgccagcgccgcgaccaccaacaccggcgcccaccatcgcgtcgcagcccctgtccctgcgcccagaggcgtgccggccagcggcggggggcgcagtgcacacgagggggctggacttcgcctgtgatatctacatctgggcgcccttggccgggacttgtggggtccttctcctgtcactggttatcaccctttactgcacgttactggccgaagccgcttggaataaggccggtgtgcgtttgtctatatgttattttccaccatattgccgtcttttggcaatgtgagggcccggaaacctggccctgtcttcttgacgagcattcctaggggtctttcccctctcgccaaaggaatgcaaggtctgttgaatgtcgtgaaggaagcagttcctctggaagcttcttgaagacaaacaacgtctgtagcgaccctttgcaggcagcggaaccccccacctggcgacaggtgcctctgcggccaaaagccacgtgtataagatacacctgcaaaggcggcacaaccccagtgccacgttgtgagttggatagttgtggaaagagtcaaatggctctcctcaagcgtattcaacaaggggctgaaggatgcccagaaggtaccccattgtatgggatctgatctggggcctcggtgcacatgctttacatgtgtttagtcgaggttaaaaaaacgtctaggccccccgaaccacggggacgtggttttcctttgaaaaacacgataataccatggtgagcaagggcgaggagctgttcaccggggtggtgcccatcctggtcgagctggacggcgacgtaaacggccacaagttcagcgtgtccggcgagggcgagggcgatgccacctacggcaagctgaccctgaagttcatctgcaccaccggcaagctgcccgtgccctggcccaccctcgtgaccaccctgacctacggcgtgcagtgcttcagccgctaccccgaccacatgaagcagcacgacttcttcaagtccgccatgcccgaaggctacgtccaggagcgcaccatcttcttcaaggacgacggcaactacaagacccgcgccgaggtgaagttcgagggcgacaccctggtgaaccgcatcgagctgaagggcatcgacttcaaggaggacggcaacatcctggggcacaagctggagtacaactacaacagccacaacgtctatatcatggccgacaagcagaagaacggcatcaaggtgaacttcaagatccgccacaacatcgaggacggcagcgtgcagctcgccgaccactaccagcagaacacccccatcggcgacggccccgtgctgctgcccgacaaccactacctgagcacccagtccgccctgagcaaagaccccaacgagaagcgcgatcacatggtcctgctggagttcgtgaccgccgccgggatcactctcggcatggacgagctgtacaagtaa

SEQ ID NO: 233 - protein, 165 aa, synthetic construct
MALPVTALLLPLALLLHAARPGALFLGFLGAAGSTMGAASVTLTVQARQLLSGIVQQQSNLLRAIEAQQHMLQLTVWGIKQLQARVLAVERYLKDQTTTPAPRPPTPAPTIASQPLSLRPEACRPAAGGAVHTRGLDFACDIYIWAPLAGTCGVLLLSLVITLYC

SEQ ID NO: 234 - DNA, 495 bp, synthetic construct
  source 1..495: mol_type = other DNA
atggcactccccgtaactgctctgctgctgccgttggcattgctcctgcacgccgcacgcccgggagctttrttccttgggttcttgggagcagcaggaagcactatgggcgcagcgtcagtgacgctgacggtacaggccagacaattaytgtctggtatagtgcarcagcagagcaatttgctgagagctattgaggcgcaacagcatatgttgcaactcacagtctggggcatyaaacagctccaggcaagagtcctggctgtggaaagatacctaaaggatcaaaccacgacgccagcgccgcgaccaccaacaccggcgcccaccatcgcgtcgcagcccctgtccctgcgcccagaggcgtgccggccagcggcggggggcgcagtgcacacgagggggctggacttcgcctgtgatatctacatctgggcgcccttggccgggacttgtggggtccttctcctgtcactggttatcaccctttactgc

SEQ ID NO: 235 - protein, 14 aa, synthetic construct
LQARILAVERYLKD

SEQ ID NO: 236 - DNA, 42 bp, synthetic construct
  source 1..42: mol_type = other DNA
ctccaggcaagaatcctagctgtagaaagatacctaaaagat

SEQ ID NO: 237 - DNA, 1584 bp, synthetic construct
  source 1..1584: mol_type = other DNA
atggcactccccgtaactgctctgctgctgccgttggcattgctcctgcacgccgcacgcccgctccaggcaagaatcctagctgtagaaagatacctaaaagataccacgacgccagcgccgcgaccaccaacaccggcgcccaccatcgcgtcgcagcccctgtccctgcgcccagaggcgtgccggccagcggcggggggcgcagtgcacacgagggggctggacttcgcctgtgatatctacatctgggcgcccttggccgggacttgtggggtccttctcctgtcactggttatcaccctttactgcacgttactggccgaagccgcttggaataaggccggtgtgcgtttgtctatatgttattttccaccatattgccgtcttttggcaatgtgagggcccggaaacctggccctgtcttcttgacgagcattcctaggggtctttcccctctcgccaaaggaatgcaaggtctgttgaatgtcgtgaaggaagcagttcctctggaagcttcttgaagacaaacaacgtctgtagcgaccctttgcaggcagcggaaccccccacctggcgacaggtgcctctgcggccaaaagccacgtgtataagatacacctgcaaaggcggcacaaccccagtgccacgttgtgagttggatagttgtggaaagagtcaaatggctctcctcaagcgtattcaacaaggggctgaaggatgcccagaaggtaccccattgtatgggatctgatctggggcctcggtgcacatgctttacatgtgtttagtcgaggttaaaaaaacgtctaggccccccgaaccacggggacgtggttttcctttgaaaaacacgataataccatggtgagcaagggcgaggagctgttcaccggggtggtgcccatcctggtcgagctggacggcgacgtaaacggccacaagttcagcgtgtccggcgagggcgagggcgatgccacctacggcaagctgaccctgaagttcatctgcaccaccggcaagctgcccgtgccctggcccaccctcgtgaccaccctgacctacggcgtgcagtgcttcagccgctaccccgaccacatgaagcagcacgacttcttcaagtccgccatgcccgaaggctacgtccaggagcgcaccatcttcttcaaggacgacggcaactacaagacccgcgccgaggtgaagttcgagggcgacaccctggtgaaccgcatcgagctgaagggcatcgacttcaaggaggacggcaacatcctggggcacaagctggagtacaactacaacagccacaacgtctatatcatggccgacaagcagaagaacggcatcaaggtgaacttcaagatccgccacaacatcgaggacggcagcgtgcagctcgccgaccactaccagcagaacacccccatcggcgacggccccgtgctgctgcccgacaaccactacctgagcacccagtccgccctgagcaaagaccccaacgagaagcgcgatcacatggtcctgctggagttcgtgaccgccgccgggatcactctcggcatggacgagctgtacaagtaa

SEQ ID NO: 238 - protein, 104 aa, synthetic construct
MALPVTALLLPLALLLHAARPLQARILAVERYLKDTTTPAPRPPTPAPTIASQPLSLRPEACRPAAGGAVHTRGLDFACDIYIWAPLAGTCGVLLLSLVITLYC

SEQ ID NO: 239 - DNA, 312 bp, synthetic construct
  source 1..312: mol_type = other DNA
atggcactccccgtaactgctctgctgctgccgttggcattgctcctgcacgccgcacgcccgctccaggcaagaatcctagctgtagaaagatacctaaaagataccacgacgccagcgccgcgaccaccaacaccggcgcccaccatcgcgtcgcagcccctgtccctgcgcccagaggcgtgccggccagcggcggggggcgcagtgcacacgagggggctggacttcgcctgtgatatctacatctgggcgcccttggccgggacttgtggggtccttctcctgtcactggttatcaccctttactgc

SEQ ID NO: 240 - protein, 9 aa, synthetic construct
AGFGLLLGF

SEQ ID NO: 241 - DNA, 27 bp, synthetic construct
  source 1..27: mol_type = other DNA
gccggcttcggcctgctgctgggcttc

SEQ ID NO: 242 - DNA, 1713 bp, synthetic construct
  source 1..1713: mol_type = other DNA
atggcactccccgtaactgctctgctgctgccgttggcattgctcctgcacgccgcacgcccggccggcttcggcctgctgctgggcttcggtggtggcggatccggtggtggcggttctggtggtggcggctccgccggcttcggcctgctgctgggcttcggtggtggcggatccggtggtggcggttctggtggtggcggctccgccggcttcggcctgctgctgggcttcaccacgacgccagcgccgcgaccaccaacaccggcgcccaccatcgcgtcgcagcccctgtccctgcgcccagaggcgtgccggccagcggcggggggcgcagtgcacacgagggggctggacttcgcctgtgatatctacatctgggcgcccttggccgggacttgtggggtccttctcctgtcactggttatcaccctttactgcacgttactggccgaagccgcttggaataaggccggtgtgcgtttgtctatatgttattttccaccatattgccgtcttttggcaatgtgagggcccggaaacctggccctgtcttcttgacgagcattcctaggggtctttcccctctcgccaaaggaatgcaaggtctgttgaatgtcgtgaaggaagcagttcctctggaagcttcttgaagacaaacaacgtctgtagcgaccctttgcaggcagcggaaccccccacctggcgacaggtgcctctgcggccaaaagccacgtgtataagatacacctgcaaaggcggcacaaccccagtgccacgttgtgagttggatagttgtggaaagagtcaaatggctctcctcaagcgtattcaacaaggggctgaaggatgcccagaaggtaccccattgtatgggatctgatctggggcctcggtgcacatgctttacatgtgtttagtcgaggttaaaaaaacgtctaggccccccgaaccacggggacgtggttttcctttgaaaaacacgataataccatggtgagcaagggcgaggagctgttcaccggggtggtgcccatcctggtcgagctggacggcgacgtaaacggccacaagttcagcgtgtccggcgagggcgagggcgatgccacctacggcaagctgaccctgaagttcatctgcaccaccggcaagctgcccgtgccctggcccaccctcgtgaccaccctgacctacggcgtgcagtgcttcagccgctaccccgaccacatgaagcagcacgacttcttcaagtccgccatgcccgaaggctacgtccaggagcgcaccatcttcttcaaggacgacggcaactacaagacccgcgccgaggtgaagttcgagggcgacaccctggtgaaccgcatcgagctgaagggcatcgacttcaaggaggacggcaacatcctggggcacaagctggagtacaactacaacagccacaacgtctatatcatggccgacaagcagaagaacggcatcaaggtgaacttcaagatccgccacaacatcgaggacggcagcgtgcagctcgccgaccactaccagcagaacacccccatcggcgacggccccgtgctgctgcccgacaaccactacctgagcacccagtccgccctgagcaaagaccccaacgagaagcgcgatcacatggtcctgctggagttcgtgaccgccgccgggatcactctcggcatggacgagctgtacaagtaa

SEQ ID NO: 243 - protein, 147 aa, synthetic construct
MALPVTALLLPLALLLHAARPAGFGLLLGFGGGGSGGGGSGGGGSAGFGLLLGFGGGGSGGGGSGGGGSAGFGLLLGFTTTPAPRPPTPAPTIASQPLSLRPEACRPAAGGAVHTRGLDFACDIYIWAPLAGTCGVLLLSLVITLYC

SEQ ID NO: 244 - DNA, 441 bp, synthetic construct
  source 1..441: mol_type = other DNA
atggcactccccgtaactgctctgctgctgccgttggcattgctcctgcacgccgcacgcccggccggcttcggcctgctgctgggcttcggtggtggcggatccggtggtggcggttctggtggtggcggctccgccggcttcggcctgctgctgggcttcggtggtggcggatccggtggtggcggttctggtggtggcggctccgccggcttcggcctgctgctgggcttcaccacgacgccagcgccgcgaccaccaacaccggcgcccaccatcgcgtcgcagcccctgtccctgcgcccagaggcgtgccggccagcggcggggggcgcagtgcacacgagggggctggacttcgcctgtgatatctacatctgggcgcccttggccgggacttgtggggtccttctcctgtcactggttatcaccctttactgc

SEQ ID NO: 245 - protein, 21 aa, synthetic construct
GNYTCEVTELTREGETIIELK

SEQ ID NO: 246 - DNA, 63 bp, synthetic construct
  source 1..63: mol_type = other DNA
ggaaactacacttgtgaagtaacagaattaaccagagaaggtgaaacgatcatcgagctaaaa

SEQ ID NO: 247 - DNA, 1605 bp, synthetic construct
  source 1..1605: mol_type = other DNA
atggcactccccgtaactgctctgctgctgccgttggcattgctcctgcacgccgcacgcccgggaaactacacttgtgaagtaacagaattaaccagagaaggtgaaacgatcatcgagctaaaaaccacgacgccagcgccgcgaccaccaacaccggcgcccaccatcgcgtcgcagcccctgtccctgcgcccagaggcgtgccggccagcggcggggggcgcagtgcacacgagggggctggacttcgcctgtgatatctacatctgggcgcccttggccgggacttgtggggtccttctcctgtcactggttatcaccctttactgcacgttactggccgaagccgcttggaataaggccggtgtgcgtttgtctatatgttattttccaccatattgccgtcttttggcaatgtgagggcccggaaacctggccctgtcttcttgacgagcattcctaggggtctttcccctctcgccaaaggaatgcaaggtctgttgaatgtcgtgaaggaagcagttcctctggaagcttcttgaagacaaacaacgtctgtagcgaccctttgcaggcagcggaaccccccacctggcgacaggtgcctctgcggccaaaagccacgtgtataagatacacctgcaaaggcggcacaaccccagtgccacgttgtgagttggatagttgtggaaagagtcaaatggctctcctcaagcgtattcaacaaggggctgaaggatgcccagaaggtaccccattgtatgggatctgatctggggcctcggtgcacatgctttacatgtgtttagtcgaggttaaaaaaacgtctaggccccccgaaccacggggacgtggttttcctttgaaaaacacgataataccatggtgagcaagggcgaggagctgttcaccggggtggtgcccatcctggtcgagctggacggcgacgtaaacggccacaagttcagcgtgtccggcgagggcgagggcgatgccacctacggcaagctgaccctgaagttcatctgcaccaccggcaagctgcccgtgccctggcccaccctcgtgaccaccctgacctacggcgtgcagtgcttcagccgctaccccgaccacatgaagcagcacgacttcttcaagtccgccatgcccgaaggctacgtccaggagcgcaccatcttcttcaaggacgacggcaactacaagacccgcgccgaggtgaagttcgagggcgacaccctggtgaaccgcatcgagctgaagggcatcgacttcaaggaggacggcaacatcctggggcacaagctggagtacaactacaacagccacaacgtctatatcatggccgacaagcagaagaacggcatcaaggtgaacttcaagatccgccacaacatcgaggacggcagcgtgcagctcgccgaccactaccagcagaacacccccatcggcgacggccccgtgctgctgcccgacaaccactacctgagcacccagtccgccctgagcaaagaccccaacgagaagcgcgatcacatggtcctgctggagttcgtgaccgccgccgggatcactctcggcatggacgagctgtacaagtaa

SEQ ID NO: 248 - protein, 111 aa, synthetic construct
MALPVTALLLPLALLLHAARPGNYTCEVTELTREGETIIELKTTTPAPRPPTPAPTIASQPLSLRPEACRPAAGGAVHTRGLDFACDIYIWAPLAGTCGVLLLSLVITLYC

SEQ ID NO: 249 - DNA, 333 bp, synthetic construct
  source 1..333: mol_type = other DNA
atggcactccccgtaactgctctgctgctgccgttggcattgctcctgcacgccgcacgcccgggaaactacacttgtgaagtaacagaattaaccagagaaggtgaaacgatcatcgagctaaaaaccacgacgccagcgccgcgaccaccaacaccggcgcccaccatcgcgtcgcagcccctgtccctgcgcccagaggcgtgccggccagcggcggggggcgcagtgcacacgagggggctggacttcgcctgtgatatctacatctgggcgcccttggccgggacttgtggggtccttctcctgtcactggttatcaccctttactgc

SEQ ID NO: 250 - protein, 28 aa, synthetic construct
LQNRRGLDLLFLKEGGLCAALKEECCFY

SEQ ID NO: 251 - DNA, 84 bp, synthetic construct; identical to SEQ ID NO: 221
  source 1..84: mol_type = other DNA

SEQ ID NO: 252 - DNA, 1884 bp, synthetic construct
  source 1..1884: mol_type = other DNA
atggcactccccgtaactgctctgctgctgccgttggcattgctcctgcacgccgcacgcccgctgcaaaacagaaggggattagacctgctttttcttaaagagggagggctctgtgctgccttaaaggaagaatgttgcttttatggtggtggcggatccggtggtggcggttctggtggtggcggctccctgcaaaacagaaggggattagacctgctttttcttaaagagggagggctctgtgctgccttaaaggaagaatgttgcttttatggtggtggcggatccggtggtggcggttctggtggtggcggctccctgcaaaacagaaggggattagacctgctttttcttaaagagggagggctctgtgctgccttaaaggaagaatgttgcttttataccacgacgccagcgccgcgaccaccaacaccggcgcccaccatcgcgtcgcagcccctgtccctgcgcccagaggcgtgccggccagcggcggggggcgcagtgcacacgagggggctggacttcgcctgtgatatctacatctgggcgcccttggccgggacttgtggggtccttctcctgtcactggttatcaccctttactgcacgttactggccgaagccgcttggaataaggccggtgtgcgtttgtctatatgttattttccaccatattgccgtcttttggcaatgtgagggcccggaaacctggccctgtcttcttgacgagcattcctaggggtctttcccctctcgccaaaggaatgcaaggtctgttgaatgtcgtgaaggaagcagttcctctggaagcttcttgaagacaaacaacgtctgtagcgaccctttgcaggcagcggaaccccccacctggcgacaggtgcctctgcggccaaaagccacgtgtataagatacacctgcaaaggcggcacaaccccagtgccacgttgtgagttggatagttgtggaaagagtcaaatggctctcctcaagcgtattcaacaaggggctgaaggatgcccagaaggtaccccattgtatgggatctgatctggggcctcggtgcacatgctttacatgtgtttagtcgaggttaaaaaaacgtctaggccccccgaaccacggggacgtggttttcctttgaaaaacacgataataccatggtgagcaagggcgaggagctgttcaccggggtggtgcccatcctggtcgagctggacggcgacgtaaacggccacaagttcagcgtgtccggcgagggcgagggcgatgccacctacggcaagctgaccctgaagttcatctgcaccaccggcaagctgcccgtgccctggcccaccctcgtgaccaccctgacctacggcgtgcagtgcttcagccgctaccccgaccacatgaagcagcacgacttcttcaagtccgccatgcccgaaggctacgtccaggagcgcaccatcttcttcaaggacgacggcaactacaagacccgcgccgaggtgaagttcgagggcgacaccctggtgaaccgcatcgagctgaagggcatcgacttcaaggaggacggcaacatcctggggcacaagctggagtacaactacaacagccacaacgtctatatcatggccgacaagcagaagaacggcatcaaggtgaacttcaagatccgccacaacatcgaggacggcagcgtgcagctcgccgaccactaccagcagaacacccccatcggcgacggccccgtgctgctgcccgacaaccactacctgagcacccagtccgccctgagcaaagaccccaacgagaagcgcgatcacatggtcctgctggagttcgtgaccgccgccgggatcactctcggcatggacgagctgtacaagtaa

SEQ ID NO: 253 - protein, 204 aa, synthetic construct
MALPVTALLLPLALLLHAARPLQNRRGLDLLFLKEGGLCAALKEECCFYGGGGSGGGGSGGGGSLQNRRGLDLLFLKEGGLCAALKEECCFYGGGGSGGGGSGGGGSLQNRRGLDLLFLKEGGLCAALKEECCFYTTTPAPRPPTPAPTIASQPLSLRPEACRPAAGGAVHTRGLDFACDIYIWAPLAGTCGVLLLSLVITLYC

SEQ ID NO: 254 - DNA, 612 bp, synthetic construct
  source 1..612: mol_type = other DNA
atggcactccccgtaactgctctgctgctgccgttggcattgctcctgcacgccgcacgcccgctgcaaaacagaaggggattagacctgctttttcttaaagagggagggctctgtgctgccttaaaggaagaatgttgcttttatggtggtggcggatccggtggtggcggttctggtggtggcggctccctgcaaaacagaaggggattagacctgctttttcttaaagagggagggctctgtgctgccttaaaggaagaatgttgcttttatggtggtggcggatccggtggtggcggttctggtggtggcggctccctgcaaaacagaaggggattagacctgctttttcttaaagagggagggctctgtgctgccttaaaggaagaatgttgcttttataccacgacgccagcgccgcgaccaccaacaccggcgcccaccatcgcgtcgcagcccctgtccctgcgcccagaggcgtgccggccagcggcggggggcgcagtgcacacgagggggctggacttcgcctgtgatatctacatctgggcgcccttggccgggacttgtggggtccttctcctgtcactggttatcaccctttactgc

SEQ ID NO: 255 - DNA, 1734 bp, synthetic construct
  source 1..1734: mol_type = other DNA
atggcactccccgtaactgctctgctgctgccgttggcattgctcctgcacgccgcacgcccgctgcaaaacagaaggggattagacctgctttttcttaaagagggagggctctgtgctgccttaaaggaagaatgttgcttttatggtggtggcggatccggtggtggcggttctggtggtggcggctccggaaactacacttgtgaagtaacagaattaaccagagaaggtgaaacgatcatcgagctaaaaaccacgacgccagcgccgcgaccaccaacaccggcgcccaccatcgcgtcgcagcccctgtccctgcgcccagaggcgtgccggccagcggcggggggcgcagtgcacacgagggggctggacttcgcctgtgatatctacatctgggcgcccttggccgggacttgtggggtccttctcctgtcactggttatcaccctttactgcacgttactggccgaagccgcttggaataaggccggtgtgcgtttgtctatatgttattttccaccatattgccgtcttttggcaatgtgagggcccggaaacctggccctgtcttcttgacgagcattcctaggggtctttcccctctcgccaaaggaatgcaaggtctgttgaatgtcgtgaaggaagcagttcctctggaagcttcttgaagacaaacaacgtctgtagcgaccctttgcaggcagcggaaccccccacctggcgacaggtgcctctgcggccaaaagccacgtgtataagatacacctgcaaaggcggcacaaccccagtgccacgttgtgagttggatagttgtggaaagagtcaaatggctctcctcaagcgtattcaacaaggggctgaaggatgcccagaaggtaccccattgtatgggatctgatctggggcctcggtgcacatgctttacatgtgtttagtcgaggttaaaaaaacgtctaggccccccgaaccacggggacgtggttttcctttgaaaaacacgataataccatggtgagcaagggcgaggagctgttcaccggggtggtgcccatcctggtcgagctggacggcgacgtaaacggccacaagttcagcgtgtccggcgagggcgagggcgatgccacctacggcaagctgaccctgaagttcatctgcaccaccggcaagctgcccgtgccctggcccaccctcgtgaccaccctgacctacggcgtgcagtgcttcagccgctaccccgaccacatgaagcagcacgacttcttcaagtccgccatgcccgaaggctacgtccaggagcgcaccatcttcttcaaggacgacggcaactacaagacccgcgccgaggtgaagttcgagggcgacaccctggtgaaccgcatcgagctgaagggcatcgacttcaaggaggacggcaacatcctggggcacaagctggagtacaactacaacagccacaacgtctatatcatggccgacaagcagaagaacggcatcaaggtgaacttcaagatccgccacaacatcgaggacggcagcgtgcagctcgccgaccactaccagcagaacacccccatcggcgacggccccgtgctgctgcccgacaaccactacctgagcacccagtccgccctgagcaaagaccccaacgagaagcgcgatcacatggtcctgctggagttcgtgaccgccgccgggatcactctcggcatggacgagctgtacaagtaa

SEQ ID NO: 256 - protein, 154 aa, synthetic construct
MALPVTALLLPLALLLHAARPLQNRRGLDLLFLKEGGLCAALKEECCFYGGGGSGGGGSGGGGSGNYTCEVTELTREGETIIELKTTTPAPRPPTPAPTIASQPLSLRPEACRPAAGGAVHTRGLDFACDIYIWAPLAGTCGVLLLSLVITLYC

SEQ ID NO: 257 - DNA, 462 bp, synthetic construct
  source 1..462: mol_type = other DNA
atggcactccccgtaactgctctgctgctgccgttggcattgctcctgcacgccgcacgcccgctgcaaaacagaaggggattagacctgctttttcttaaagagggagggctctgtgctgccttaaaggaagaatgttgcttttatggtggtggcggatccggtggtggcggttctggtggtggcggctccggaaactacacttgtgaagtaacagaattaaccagagaaggtgaaacgatcatcgagctaaaaaccacgacgccagcgccgcgaccaccaacaccggcgcccaccatcgcgtcgcagcccctgtccctgcgcccagaggcgtgccggccagcggcggggggcgcagtgcacacgagggggctggacttcgcctgtgatatctacatctgggcgcccttggccgggacttgtggggtccttctcctgtcactggttatcaccctttactgc

SEQ ID NO: 258 - DNA, 1734 bp, synthetic construct
  source 1..1734: mol_type = other DNA
atggcactccccgtaactgctctgctgctgccgttggcattgctcctgcacgccgcacgcccgggaaactacacttgtgaagtaacagaattaaccagagaaggtgaaacgatcatcgagctaaaaggtggtggcggatccggtggtggcggttctggtggtggcggctccctgcaaaacagaaggggattagacctgctttttcttaaagagggagggctctgtgctgccttaaaggaagaatgttgcttttataccacgacgccagcgccgcgaccaccaacaccggcgcccaccatcgcgtcgcagcccctgtccctgcgcccagaggcgtgccggccagcggcggggggcgcagtgcacacgagggggctggacttcgcctgtgatatctacatctgggcgcccttggccgggacttgtggggtccttctcctgtcactggttatcaccctttactgcacgttactggccgaagccgcttggaataaggccggtgtgcgtttgtctatatgttattttccaccatattgccgtcttttggcaatgtgagggcccggaaacctggccctgtcttcttgacgagcattcctaggggtctttcccctctcgccaaaggaatgcaaggtctgttgaatgtcgtgaaggaagcagttcctctggaagcttcttgaagacaaacaacgtctgtagcgaccctttgcaggcagcggaaccccccacctggcgacaggtgcctctgcggccaaaagccacgtgtataagatacacctgcaaaggcggcacaaccccagtgccacgttgtgagttggatagttgtggaaagagtcaaatggctctcctcaagcgtattcaacaaggggctgaaggatgcccagaaggtaccccattgtatgggatctgatctggggcctcggtgcacatgctttacatgtgtttagtcgaggttaaaaaaacgtctaggccccccgaaccacggggacgtggttttcctttgaaaaacacgataataccatggtgagcaagggcgaggagctgttcaccggggtggtgcccatcctggtcgagctggacggcgacgtaaacggccacaagttcagcgtgtccggcgagggcgagggcgatgccacctacggcaagctgaccctgaagttcatctgcaccaccggcaagctgcccgtgccctggcccaccctcgtgaccaccctgacctacggcgtgcagtgcttcagccgctaccccgaccacatgaagcagcacgacttcttcaagtccgccatgcccgaaggctacgtccaggagcgcaccatcttcttcaaggacgacggcaactacaagacccgcgccgaggtgaagttcgagggcgacaccctggtgaaccgcatcgagctgaagggcatcgacttcaaggaggacggcaacatcctggggcacaagctggagtacaactacaacagccacaacgtctatatcatggccgacaagcagaagaacggcatcaaggtgaacttcaagatccgccacaacatcgaggacggcagcgtgcagctcgccgaccactaccagcagaacacccccatcggcgacggccccgtgctgctgcccgacaaccactacctgagcacccagtccgccctgagcaaagaccccaacgagaagcgcgatcacatggtcctgctggagttcgtgaccgccgccgggatcactctcggcatggacgagctgtacaagtaa

SEQ ID NO: 259 - protein, 154 aa, synthetic construct
MALPVTALLLPLALLLHAARPGNYTCEVTELTREGETIIELKGGGGSGGGGSGGGGSLQNRRGLDLLFLKEGGLCAALKEECCFYTTTPAPRPPTPAPTIASQPLSLRPEACRPAAGGAVHTRGLDFACDIYIWAPLAGTCGVLLLSLVITLYC

SEQ ID NO: 260 - DNA, 462 bp, synthetic construct
  source 1..462: mol_type = other DNA
atggcactccccgtaactgctctgctgctgccgttggcattgctcctgcacgccgcacgcccgggaaactacacttgtgaagtaacagaattaaccagagaaggtgaaacgatcatcgagctaaaaggtggtggcggatccggtggtggcggttctggtggtggcggctccctgcaaaacagaaggggattagacctgctttttcttaaagagggagggctctgtgctgccttaaaggaagaatgttgcttttataccacgacgccagcgccgcgaccaccaacaccggcgcccaccatcgcgtcgcagcccctgtccctgcgcccagaggcgtgccggccagcggcggggggcgcagtgcacacgagggggctggacttcgcctgtgatatctacatctgggcgcccttggccgggacttgtggggtccttctcctgtcactggttatcaccctttactgc

SEQ ID NO: 261 - DNA, 1875 bp, synthetic construct
  source 1..1875: mol_type = other DNA
atggcactccccgtaactgctctgctgctgccgttggcattgctcctgcacgccgcacgcccgggagctttrttccttgggttcttgggagcagcaggaagcactatgggcgcagcgtcagtgacgctgacggtacaggccagacaattaytgtctggtatagtgcarcagcagagcaatttgctgagagctattgaggcgcaacagcatatgttgcaactcacagtctggggcatyaaacagctccaggcaagagtcctggctgtggaaagatacctaaaggatcaaggtggtggcggatccggtggtggcggttctggtggtggcggctccggaaactacacttgtgaagtaacagaattaaccagagaaggtgaaacgatcatcgagctaaaaaccacgacgccagcgccgcgaccaccaacaccggcgcccaccatcgcgtcgcagcccctgtccctgcgcccagaggcgtgccggccagcggcggggggcgcagtgcacacgagggggctggacttcgcctgtgatatctacatctgggcgcccttggccgggacttgtggggtccttctcctgtcactggttatcaccctttactgcacgttactggccgaagccgcttggaataaggccggtgtgcgtttgtctatatgttattttccaccatattgccgtcttttggcaatgtgagggcccggaaacctggccctgtcttcttgacgagcattcctaggggtctttcccctctcgccaaaggaatgcaaggtctgttgaatgtcgtgaaggaagcagttcctctggaagcttcttgaagacaaacaacgtctgtagcgaccctttgcaggcagcggaaccccccacctggcgacaggtgcctctgcggccaaaagccacgtgtataagatacacctgcaaaggcggcacaaccccagtgccacgttgtgagttggatagttgtggaaagagtcaaatggctctcctcaagcgtattcaacaaggggctgaaggatgcccagaaggtaccccattgtatgggatctgatctggggcctcggtgcacatgctttacatgtgtttagtcgaggttaaaaaaacgtctaggccccccgaaccacggggacgtggttttcctttgaaaaacacgataataccatggtgagcaagggcgaggagctgttcaccggggtggtgcccatcctggtcgagctggacggcgacgtaaacggccacaagttcagcgtgtccggcgagggcgagggcgatgccacctacggcaagctgaccctgaagttcatctgcaccaccggcaagctgcccgtgccctggcccaccctcgtgaccaccctgacctacggcgtgcagtgcttcagccgctaccccgaccacatgaagcagcacgacttcttcaagtccgccatgcccgaaggctacgtccaggagcgcaccatcttcttcaaggacgacggcaactacaagacccgcgccgaggtgaagttcgagggcgacaccctggtgaaccgcatcgagctgaagggcatcgacttcaaggaggacggcaacatcctggggcacaagctggagtacaactacaacagccacaacgtctatatcatggccgacaagcagaagaacggcatcaaggtgaacttcaagatccgccacaacatcgaggacggcagcgtgcagctcgccgaccactaccagcagaacacccccatcggcgacggccccgtgctgctgcccgacaaccactacctgagcacccagtccgccctgagcaaagaccccaacgagaagcgcgatcacatggtcctgctggagttcgtgaccgccgccgggatcactctcggcatggacgagctgtacaagtaa

SEQ ID NO: 262 - protein, 201 aa, synthetic construct
MALPVTALLLPLALLLHAARPGALFLGFLGAAGSTMGAASVTLTVQARQLLSGIVQQQSNLLRAIEAQQHMLQLTVWGIKQLQARVLAVERYLKDQGGGGSGGGGSGGGGSGNYTCEVTELTREGETIIELKTTTPAPRPPTPAPTIASQPLSLRPEACRPAAGGAVHTRGLDFACDIYIWAPLAGTCGVLLLSLVITLYC

SEQ ID NO: 263 - DNA, 603 bp, synthetic construct
  source 1..603: mol_type = other DNA
atggcactccccgtaactgctctgctgctgccgttggcattgctcctgcacgccgcacgcccgggagctttrttccttgggttcttgggagcagcaggaagcactatgggcgcagcgtcagtgacgctgacggtacaggccagacaattaytgtctggtatagtgcarcagcagagcaatttgctgagagctattgaggcgcaacagcatatgttgcaactcacagtctggggcatyaaacagctccaggcaagagtcctggctgtggaaagatacctaaaggatcaaggtggtggcggatccggtggtggcggttctggtggtggcggctccggaaactacacttgtgaagtaacagaattaaccagagaaggtgaaacgatcatcgagctaaaaaccacgacgccagcgccgcgaccaccaacaccggcgcccaccatcgcgtcgcagcccctgtccctgcgcccagaggcgtgccggccagcggcggggggcgcagtgcacacgagggggctggacttcgcctgtgatatctacatctgggcgcccttggccgggacttgtggggtccttctcctgtcactggttatcaccctttactgc

SEQ ID NO: 264 - DNA, 1692 bp, synthetic construct
  source 1..1692: mol_type = other DNA
atggcactccccgtaactgctctgctgctgccgttggcattgctcctgcacgccgcacgcccgctccaggcaagaatcctagctgtagaaagatacctaaaagatggtggtggcggatccggtggtggcggttctggtggtggcggctccggaaactacacttgtgaagtaacagaattaaccagagaaggtgaaacgatcatcgagctaaaaaccacgacgccagcgccgcgaccaccaacaccggcgcccaccatcgcgtcgcagcccctgtccctgcgcccagaggcgtgccggccagcggcggggggcgcagtgcacacgagggggctggacttcgcctgtgatatctacatctgggcgcccttggccgggacttgtggggtccttctcctgtcactggttatcaccctttactgcacgttactggccgaagccgcttggaataaggccggtgtgcgtttgtctatatgttattttccaccatattgccgtcttttggcaatgtgagggcccggaaacctggccctgtcttcttgacgagcattcctaggggtctttcccctctcgccaaaggaatgcaaggtctgttgaatgtcgtgaaggaagcagttcctctggaagcttcttgaagacaaacaacgtctgtagcgaccctttgcaggcagcggaaccccccacctggcgacaggtgcctctgcggccaaaagccacgtgtataagatacacctgcaaaggcggcacaaccccagtgccacgttgtgagttggatagttgtggaaagagtcaaatggctctcctcaagcgtattcaacaaggggctgaaggatgcccagaaggtaccccattgtatgggatctgatctggggcctcggtgcacatgctttacatgtgtttagtcgaggttaaaaaaacgtctaggccccccgaaccacggggacgtggttttcctttgaaaaacacgataataccatggtgagcaagggcgaggagctgttcaccggggtggtgcccatcctggtcgagctggacggcgacgtaaacggccacaagttcagcgtgtccggcgagggcgagggcgatgccacctacggcaagctgaccctgaagttcatctgcaccaccggcaagctgcccgtgccctggcccaccctcgtgaccaccctgacctacggcgtgcagtgcttcagccgctaccccgaccacatgaagcagcacgacttcttcaagtccgccatgcccgaaggctacgtccaggagcgcaccatcttcttcaaggacgacggcaactacaagacccgcgccgaggtgaagttcgagggcgacaccctggtgaaccgcatcgagctgaagggcatcgacttcaaggaggacggcaacatcctggggcacaagctggagtacaactacaacagccacaacgtctatatcatggccgacaagcagaagaacggcatcaaggtgaacttcaagatccgccacaacatcgaggacggcagcgtgcagctcgccgaccactaccagcagaacacccccatcggcgacggccccgtgctgctgcccgacaaccactacctgagcacccagtccgccctgagcaaagaccccaacgagaagcgcgatcacatggtcctgctggagttcgtgaccgccgccgggatcactctcggcatggacgagctgtacaagtaa

SEQ ID NO: 265 - protein, 140 aa, synthetic construct
MALPVTALLLPLALLLHAARPLQARILAVERYLKDGGGGSGGGGSGGGGSGNYTCEVTELTREGETIIELKTTTPAPRPPTPAPTIASQPLSLRPEACRPAAGGAVHTRGLDFACDIYIWAPLAGTCGVLLLSLVITLYC

SEQ ID NO: 266 - DNA, 420 bp, synthetic construct
  source 1..420: mol_type = other DNA
atggcactccccgtaactgctctgctgctgccgttggcattgctcctgcacgccgcacgcccgctccaggcaagaatcctagctgtagaaagatacctaaaagatggtggtggcggatccggtggtggcggttctggtggtggcggctccggaaactacacttgtgaagtaacagaattaaccagagaaggtgaaacgatcatcgagctaaaaaccacgacgccagcgccgcgaccaccaacaccggcgcccaccatcgcgtcgcagcccctgtccctgcgcccagaggcgtgccggccagcggcggggggcgcagtgcacacgagggggctggacttcgcctgtgatatctacatctgggcgcccttggccgggacttgtggggtccttctcctgtcactggttatcaccctttactgc

SEQ ID NO: 267 - DNA, 1734 bp, synthetic construct
  source 1..1734: mol_type = other DNA
atggcactccccgtaactgctctgctgctgccgttggcattgctcctgcacgccgcacgcccggcccagaacagacgaggccttgatctcctattctgggagcaaggaggattatgcaaagcattacaagaacagtgccgttttccgggtggtggcggatccggtggtggcggttctggtggtggcggctccggaaactacacttgtgaagtaacagaattaaccagagaaggtgaaacgatcatcgagctaaaaaccacgacgccagcgccgcgaccaccaacaccggcgcccaccatcgcgtcgcagcccctgtccctgcgcccagaggcgtgccggccagcggcggggggcgcagtgcacacgagggggctggacttcgcctgtgatatctacatctgggcgcccttggccgggacttgtggggtccttctcctgtcactggttatcaccctttactgcacgttactggccgaagccgcttggaataaggccggtgtgcgtttgtctatatgttattttccaccatattgccgtcttttggcaatgtgagggcccggaaacctggccctgtcttcttgacgagcattcctaggggtctttcccctctcgccaaaggaatgcaaggtctgttgaatgtcgtgaaggaagcagttcctctggaagcttcttgaagacaaacaacgtctgtagcgaccctttgcaggcagcggaaccccccacctggcgacaggtgcctctgcggccaaaagccacgtgtataagatacacctgcaaaggcggcacaaccccagtgccacgttgtgagttggatagttgtggaaagagtcaaatggctctcctcaagcgtattcaacaaggggctgaaggatgcccagaaggtaccccattgtatgggatctgatctggggcctcggtgcacatgctttacatgtgtttagtcgaggttaaaaaaacgtctaggccccccgaaccacggggacgtggttttcctttgaaaaacacgataataccatggtgagcaagggcgaggagctgttcaccggggtggtgcccatcctggtcgagctggacggcgacgtaaacggccacaagttcagcgtgtccggcgagggcgagggcgatgccacctacggcaagctgaccctgaagttcatctgcaccaccggcaagctgcccgtgccctggcccaccctcgtgaccaccctgacctacggcgtgcagtgcttcagccgctaccccgaccacatgaagcagcacgacttcttcaagtccgccatgcccgaaggctacgtccaggagcgcaccatcttcttcaaggacgacggcaactacaagacccgcgccgaggtgaagttcgagggcgacaccctggtgaaccgcatcgagctgaagggcatcgacttcaaggaggacggcaacatcctggggcacaagctggagtacaactacaacagccacaacgtctatatcatggccgacaagcagaagaacggcatcaaggtgaacttcaagatccgccacaacatcgaggacggcagcgtgcagctcgccgaccactaccagcagaacacccccatcggcgacggccccgtgctgctgcccgacaaccactacctgagcacccagtccgccctgagcaaagaccccaacgagaagcgcgatcacatggtcctgctggagttcgtgaccgccgccgggatcactctcggcatggacgagctgtacaagtaa

SEQ ID NO: 268 - protein, 154 aa, synthetic construct
MALPVTALLLPLALLLHAARPAQNRRGLDLLFWEQGGLCKALQEQCRFPGGGGSGGGGSGGGGSGNYTCEVTELTREGETIIELKTTTPAPRPPTPAPTIASQPLSLRPEACRPAAGGAVHTRGLDFACDIYIWAPLAGTCGVLLLSLVITLYC

SEQ ID NO: 269 - DNA, 462 bp, synthetic construct
  source 1..462: mol_type = other DNA
atggcactccccgtaactgctctgctgctgccgttggcattgctcctgcacgccgcacgcccggcccagaacagacgaggccttgatctcctattctgggagcaaggaggattatgcaaagcattacaagaacagtgccgttttccgggtggtggcggatccggtggtggcggttctggtggtggcggctccggaaactacacttgtgaagtaacagaattaaccagagaaggtgaaacgatcatcgagctaaaaaccacgacgccagcgccgcgaccaccaacaccggcgcccaccatcgcgtcgcagcccctgtccctgcgcccagaggcgtgccggccagcggcggggggcgcagtgcacacgagggggctggacttcgcctgtgatatctacatctgggcgcccttggccgggacttgtggggtccttctcctgtcactggttatcaccctttactgc

SEQ ID NO: 270 - DNA, 1863 bp, synthetic construct
  source 1..1863: mol_type = other DNA
atggcactccccgtaactgctctgctgctgccgttggcattgctcctgcacgccgcacgcccgggaaactacacttgtgaagtaacagaattaaccagagaaggtgaaacgatcatcgagctaaaaggtggtggcggatccggtggtggcggttctggtggtggcggctccctgcaaaacagaaggggattagacctgctttttcttaaagagggagggctctgtgctgccttaaaggaagaatgttgcttttatggtggtggcggatccggtggtggcggttctggtggtggcggctccctgcaaaacagaaggggattagacctgctttttcttaaagagggagggctctgtgctgccttaaaggaagaatgttgcttttataccacgacgccagcgccgcgaccaccaacaccggcgcccaccatcgcgtcgcagcccctgtccctgcgcccagaggcgtgccggccagcggcggggggcgcagtgcacacgagggggctggacttcgcctgtgatatctacatctgggcgcccttggccgggacttgtggggtccttctcctgtcactggttatcaccctttactgcacgttactggccgaagccgcttggaataaggccggtgtgcgtttgtctatatgttattttccaccatattgccgtcttttggcaatgtgagggcccggaaacctggccctgtcttcttgacgagcattcctaggggtctttcccctctcgccaaaggaatgcaaggtctgttgaatgtcgtgaaggaagcagttcctctggaagcttcttgaagacaaacaacgtctgtagcgaccctttgcaggcagcggaaccccccacctggcgacaggtgcctctgcggccaaaagccacgtgtataagatacacctgcaaaggcggcacaaccccagtgccacgttgtgagttggatagttgtggaaagagtcaaatggctctcctcaagcgtattcaacaaggggctgaaggatgcccagaaggtaccccattgtatgggatctgatctggggcctcggtgcacatgctttacatgtgtttagtcgaggttaaaaaaacgtctaggccccccgaaccacggggacgtggttttcctttgaaaaacacgataataccatggtgagcaagggcgaggagctgttcaccggggtggtgcccatcctggtcgagctggacggcgacgtaaacggccacaagttcagcgtgtccggcgagggcgagggcgatgccacctacggcaagctgaccctgaagttcatctgcaccaccggcaagctgcccgtgccctggcccaccctcgtgaccaccctgacctacggcgtgcagtgcttcagccgctaccccgaccacatgaagcagcacgacttcttcaagtccgccatgcccgaaggctacgtccaggagcgcaccatcttcttcaaggacgacggcaactacaagacccgcgccgaggtgaagttcgagggcgacaccctggtgaaccgcatcgagctgaagggcatcgacttcaaggaggacggcaacatcctggggcacaagctggagtacaactacaacagccacaacgtctatatcatggccgacaagcagaagaacggcatcaaggtgaacttcaagatccgccacaacatcgaggacggcagcgtgcagctcgccgaccactaccagcagaacacccccatcggcgacggccccgtgctgctgcccgacaaccactacctgagcacccagtccgccctgagcaaagaccccaacgagaagcgcgatcacatggtcctgctggagttcgtgaccgccgccgggatcactctcggcatggacgagctgtacaagtaa

SEQ ID NO: 271 - protein, 197 aa, synthetic construct
MALPVTALLLPLALLLHAARPGNYTCEVTELTREGETIIELKGGGGSGGGGSGGGGSLQNRRGLDLLFLKEGGLCAALKEECCFYGGGGSGGGGSGGGGSLQNRRGLDLLFLKEGGLCAALKEECCFYTTTPAPRPPTPAPTIASQPLSLRPEACRPAAGGAVHTRGLDFACDIYIWAPLAGTCGVLLLSLVITLYC

SEQ ID NO: 272 - DNA, 591 bp, synthetic construct
  source 1..591: mol_type = other DNA
atggcactccccgtaactgctctgctgctgccgttggcattgctcctgcacgccgcacgcccgggaaactacacttgtgaagtaacagaattaaccagagaaggtgaaacgatcatcgagctaaaaggtggtggcggatccggtggtggcggttctggtggtggcggctccctgcaaaacagaaggggattagacctgctttttcttaaagagggagggctctgtgctgccttaaaggaagaatgttgcttttatggtggtggcggatccggtggtggcggttctggtggtggcggctccctgcaaaacagaaggggattagacctgctttttcttaaagagggagggctctgtgctgccttaaaggaagaatgttgcttttataccacgacgccagcgccgcgaccaccaacaccggcgcccaccatcgcgtcgcagcccctgtccctgcgcccagaggcgtgccggccagcggcggggggcgcagtgcacacgagggggctggacttcgcctgtgatatctacatctgggcgcccttggccgggacttgtggggtccttctcctgtcactggttatcaccctttactgc

SEQ ID NO: 273 - protein, 335 aa, synthetic construct
HSLKYFHTSVSRPGRGEPRFISVGYVDDTQFVRFDNDAASPRMVPRAPWMEQEGSEYWDRETRSARDTAQIFRVNLRTLRGYYNQSEAGSHTLQWMHGCELGPDRRFLRGYEQFAYDGKDYLTLNEDLRSWTAVDTAAQISEQKSNDASEAEHQRAYLEDTCVEWLHKYLEKGKETLLHLEPPKTHVTHHPISDHEATLRCWALGFYPAEITLTWQQDGEGHTQDTELVETRPAGDGTFQKWAAVVVPSGEEQRYTCHVQHEGLPEPVTLRWKPASQPTIPIVGIIAGLVLLGSVVSGAVVAAVIWRKKSSGGKGGSYYKAEWSDSAQGSESHSL

SEQ ID NO: 274 - DNA, 1008 bp, synthetic construct
  source 1..1008: mol_type = other DNA
cactccttgaagtatttccacacttccgtgtcccggcccggccgcggggagccccgcttcatctctgtgggctacgtggacgacacccagttcgtgcgcttcgacaacgacgccgcgagtccgaggatggtgccgcgggcgccgtggatggagcaggaggggtcagagtattgggaccgggagacacggagcgccagggacaccgcacagattttccgagtgaacctgcggacgctgcgcggctactacaatcagagcgaggccgggtctcacaccctgcagtggatgcatggctgcgagctggggcccgacaggcgcttcctccgcgggtatgaacagttcgcctacgacggcaaggattatctcaccctgaatgaggacctgcgctcctggaccgcggtggacacggcggctcagatctccgagcaaaagtcaaatgatgcctctgaggcggagcaccagagagcctacctggaagacacatgcgtggagtggctccacaaatacctggagaaggggaaggagacgctgcttcacctggagcccccaaagacacacgtgactcaccaccccatctctgaccatgaggccaccctgaggtgctgggctctgggcttctaccctgcggagatcacactgacctggcagcaggatggggagggccatacccaggacacggagctcgtggagaccaggcctgcaggggatggaaccttccagaagtgggcagctgtggtggtgccttctggagaggagcagagatacacgtgccatgtgcagcatgaggggctacccgagcccgtcaccctgagatggaagccggcttcccagcccaccatccccatcgtgggcatcattgctggcctggttctccttggatctgtggtctctggagctgtggttgctgctgtgatatggaggaagaagagctcaggtggaaaaggagggagctactataaggctgagtggagcgacagtgcccaggggtctgagtctcacagcttgtaa

SEQ ID NO: 275 - DNA, 2835 bp, synthetic construct
  source 1..2835: mol_type = other DNA
atggcactccccgtaactgctctgctgctgccgttggcattgctcctgcacgccgcacgcccgtctcgctccgtggccttagctgtgctcgcgctactctctcttagcggcctcgaagctgttatggctccgcggactttattcttaggtggtggcggatccggtggtggcggttctggtggtggcggctccatccagcgtacgcccaaaattcaagtctacagccgacatcctgcagagaacggcaaatctaatttcctgaactgctatgtatcaggctttcaccctagcgatatagaagtggacctgctgaaaaacggagagaggatagaaaaggtcgaacacagcgacctctccttttccaaggactggagcttttatcttctgtattatactgaatttacacccacggaaaaagatgagtatgcgtgccgagtaaaccacgtcacgctgtcacagcccaaaatagtaaaatgggatcgcgacatgggtggtggcggttctggtggtggcggtagtggcggcggaggaagcggtggtggcggttccggatctcactccttgaagtatttccacacttccgtgtcccggcccggccgcggggagccccgcttcatctctgtgggctacgtggacgacacccagttcgtgcgcttcgacaacgacgccgcgagtccgaggatggtgccgcgggcgccgtggatggagcaggaggggtcagagtattgggaccgggagacacggagcgccagggacaccgcacagattttccgagtgaacctgcggacgctgcgcggctactacaatcagagcgaggccgggtctcacaccctgcagtggatgcatggctgcgagctggggcccgacaggcgcttcctccgcgggtatgaacagttcgcctacgacggcaaggattatctcaccctgaatgaggacctgcgctcctggaccgcggtggacacggcggctcagatctccgagcaaaagtcaaatgatgcctctgaggcggagcaccagagagcctacctggaagacacatgcgtggagtggctccacaaatacctggagaaggggaaggagacgctgcttcacctggagcccccaaagacacacgtgactcaccaccccatctctgaccatgaggccaccctgaggtgctgggctctgggcttctaccctgcggagatcacactgacctggcagcaggatggggagggccatacccaggacacggagctcgtggagaccaggcctgcaggggatggaaccttccagaagtgggcagctgtggtggtgccttctggagaggagcagagatacacgtgccatgtgcagcatgaggggctacccgagcccgtcaccctgagatggaagccggcttcccagcccaccatccccatcgtgggcatcattgctggcctggttctccttggatctgtggtctctggagctgtggttgctgctgtgatatggaggaagaagagctcaggtggaaaaggagggagctactataaggctgagtggagcgacagtgcccaggggtctgagtctcacagcttgtaaacgttactggccgaagccgcttggaataaggccggtgtgcgtttgtctatatgttattttccaccatattgccgtcttttggcaatgtgagggcccggaaacctggccctgtcttcttgacgagcattcctaggggtctttcccctctcgccaaaggaatgcaaggtctgttgaatgtcgtgaaggaagcagttcctctggaagcttcttgaagacaaacaacgtctgtagcgaccctttgcaggcagcggaaccccccacctggcgacaggtgcctctgcggccaaaagccacgtgtataagatacacctgcaaaggcggcacaaccccagtgccacgttgtgagttggatagttgtggaaagagtcaaatggctctcctcaagcgtattcaacaaggggctgaaggatgcccagaaggtaccccattgtatgggatctgatctggggcctcggtgcacatgctttacatgtgtttagtcgaggttaaaaaaacgtctaggccccccgaaccacggggacgtggttttcctttgaaaaacacgataataccatggtgagcaagggcgaggagctgttcaccggggtggtgcccatcctggtcgagctggacggcgacgtaaacggccacaagttcagcgtgtccggcgagggcgagggcgatgccacctacggcaagctgaccctgaagttcatctgcaccaccggcaagctgcccgtgccctggcccaccctcgtgaccaccctgacctacggcgtgcagtgcttcagccgctaccccgaccacatgaagcagcacgacttcttcaagtccgccatgcccgaaggctacgtccaggagcgcaccatcttcttcaaggacgacggcaactacaagacccgcgccgaggtgaagttcgagggcgacaccctggtgaaccgcatcgagctgaagggcatcgacttcaaggaggacggcaacatcctggggcacaagctggagtacaactacaacagccacaacgtctatatcatggccgacaagcagaagaacggcatcaaggtgaacttcaagatccgccacaacatcgaggacggcagcgtgcagctcgccgaccactaccagcagaacacccccatcggcgacggccccgtgctgctgcccgacaaccactacctgagcacccagtccgccctgagcaaagaccccaacgagaagcgcgatcacatggtcctgctggagttcgtgaccgccgccgggatcactctcggcatggacgagctgtacaagtaa

SEQ ID NO: 276 - protein, 520 aa, synthetic construct
MALPVTALLLPLALLLHAARPSRSVALAVLALLSLSGLEAVMAPRTLFLGGGGSGGGGSGGGGSIQRTPKIQVYSRHPAENGKSNFLNCYVSGFHPSDIEVDLLKNGERIEKVEHSDLSFSKDWSFYLLYYTEFTPTEKDEYACRVNHVTLSQPKIVKWDRDMGGGGSGGGGSGGGGSGGGGSGSHSLKYFHTSVSRPGRGEPRFISVGYVDDTQFVRFDNDAASPRMVPRAPWMEQEGSEYWDRETRSARDTAQIFRVNLRTLRGYYNQSEAGSHTLQWMHGCELGPDRRFLRGYEQFAYDGKDYLTLNEDLRSWTAVDTAAQISEQKSNDASEAEHQRAYLEDTCVEWLHKYLEKGKETLLHLEPPKTHVTHHPISDHEATLRCWALGFYPAEITLTWQQDGEGHTQDTELVETRPAGDGTFQKWAAVVVPSGEEQRYTCHVQHEGLPEPVTLRWKPASQPTIPIVGIIAGLVLLGSVVSGAVVAAVIWRKKSSGGKGGSYYKAEWSDSAQGSESHSL

SEQ ID NO: 277 - DNA, 1563 bp, synthetic construct
  source 1..1563: mol_type = other DNA
atggcactccccgtaactgctctgctgctgccgttggcattgctcctgcacgccgcacgcccgtctcgctccgtggccttagctgtgctcgcgctactctctcttagcggcctcgaagctgttatggctccgcggactttattcttaggtggtggcggatccggtggtggcggttctggtggtggcggctccatccagcgtacgcccaaaattcaagtctacagccgacatcctgcagagaacggcaaatctaatttcctgaactgctatgtatcaggctttcaccctagcgatatagaagtggacctgctgaaaaacggagagaggatagaaaaggtcgaacacagcgacctctccttttccaaggactggagcttttatcttctgtattatactgaatttacacccacggaaaaagatgagtatgcgtgccgagtaaaccacgtcacgctgtcacagcccaaaatagtaaaatgggatcgcgacatgggtggtggcggttctggtggtggcggtagtggcggcggaggaagcggtggtggcggttccggatctcactccttgaagtatttccacacttccgtgtcccggcccggccgcggggagccccgcttcatctctgtgggctacgtggacgacacccagttcgtgcgcttcgacaacgacgccgcgagtccgaggatggtgccgcgggcgccgtggatggagcaggaggggtcagagtattgggaccgggagacacggagcgccagggacaccgcacagattttccgagtgaacctgcggacgctgcgcggctactacaatcagagcgaggccgggtctcacaccctgcagtggatgcatggctgcgagctggggcccgacaggcgcttcctccgcgggtatgaacagttcgcctacgacggcaaggattatctcaccctgaatgaggacctgcgctcctggaccgcggtggacacggcggctcagatctccgagcaaaagtcaaatgatgcctctgaggcggagcaccagagagcctacctggaagacacatgcgtggagtggctccacaaatacctggagaaggggaaggagacgctgcttcacctggagcccccaaagacacacgtgactcaccaccccatctctgaccatgaggccaccctgaggtgctgggctctgggcttctaccctgcggagatcacactgacctggcagcaggatggggagggccatacccaggacacggagctcgtggagaccaggcctgcaggggatggaaccttccagaagtgggcagctgtggtggtgccttctggagaggagcagagatacacgtgccatgtgcagcatgaggggctacccgagcccgtcaccctgagatggaagccggcttcccagcccaccatccccatcgtgggcatcattgctggcctggttctccttggatctgtggtctctggagctgtggttgctgctgtgatatggaggaagaagagctcaggtggaaaaggagggagctactataaggctgagtggagcgacagtgcccaggggtctgagtctcacagcttgtaa

SEQ ID NO: 278 - protein, 327 aa, synthetic construct
LLSGALTLTETWAGSHSMRYFSAAVSRPGRGEPRFIAMGYVDDTQFVRFDSDSACPRMEPRAPWVEQEGPEYWEEETRNTKAHAQTDRMNLQTLRGYYNQSEASSHTLQWMIGCDLGSDGRLLRGYEQYAYDGKDYLALNEDLRSWTAADTAAQISKRKCEAANVAEQRRAYLEGTCVEWLHRYLENGKEMLQRADPPKTHVTHHPVFDYEATLRCWALGFYPAEIILTWQRDGEDQTQDVELVETRPAGDGTFQKWAAVVVPSGEEQRYTCHVQHEGLPEPLMLRWKQSSLPTIPIMGIVAGLVVLAAVVTGAAVAAVLWRKKSSD

SEQ ID NO: 279 - protein, 512 aa, synthetic construct
MALPVTALLLPLALLLHAARPSRSVALAVLALLSLSGLEAVMAPRTLFLGGGGSGGGGSGGGGSIQRTPKIQVYSRHPAENGKSNFLNCYVSGFHPSDIEVDLLKNGERIEKVEHSDLSFSKDWSFYLLYYTEFTPTEKDEYACRVNHVTLSQPKIVKWDRDMGGGGSGGGGSGGGGSGGGGSGSLLSGALTLTETWAGSHSMRYFSAAVSRPGRGEPRFIAMGYVDDTQFVRFDSDSACPRMEPRAPWVEQEGPEYWEEETRNTKAHAQTDRMNLQTLRGYYNQSEASSHTLQWMIGCDLGSDGRLLRGYEQYAYDGKDYLALNEDLRSWTAADTAAQISKRKCEAANVAEQRRAYLEGTCVEWLHRYLENGKEMLQRADPPKTHVTHHPVFDYEATLRCWALGFYPAEIILTWQRDGEDQTQDVELVETRPAGDGTFQKWAAVVVPSGEEQRYTCHVQHEGLPEPLMLRWKQSSLPTIPIMGIVAGLVVLAAVVTGAAVAAVLWRKKSSD

SEQ ID NO: 280 - protein, 349 aa, synthetic construct
MHVLRYGYTGIFDDTSHMTLTVVGIFDGQHFFTYHVNSSDKASSRANGTISWMANVSAAYPTYLDGERAKGDLIFNQTEQNLLELEIALGYRSQSVLTWTHECNTTENGSFVAGYEGFGWDGETLMELKDNLTLWTGPNYEISWLKQNKTYIDGKIKNISEGDTTIQRNYLKGNCTQWSVIYSGFQTPVTHPVVKGGVRNQNDNRAEAFCTSYGFFPGEINITFIHYGNKAPDDSEPQCNPLLPTFDGTFHQGCYVAIFCNQNYTCRVTHGNWTVEIPISVTSPDDSSSGEVPDHPTANKRYNTMTISSVLLALLLCALLFAFLHYFTTLKQYLRNLAFAWRYRKVRSS

SEQ ID NO: 281 - DNA, 1050 bp, synthetic construct
  source 1..1050: mol_type = other DNA
atgcacgtgctgagatacggatataccggcatcttcgacgatacatcccatatgactctgaccgtggtcgggatttttgacggacagcacttctttacataccatgtgaacagctccgataaggcttctagtcgagcaaatggcaccatctcatggatggccaacgtgagcgcagcctaccccacatatctggacggagaacgcgctaaaggcgatctgatcttcaatcagaccgagcagaacctgctggagctggaaattgctctggggtacaggtctcagagtgtcctgacatggactcacgaatgtaataccacagagaacgggagcttcgtggcaggatatgagggctttgggtgggacggagaaacactgatggagctgaaggataatctgactctgtggaccggccctaactacgaaatcagctggctgaagcagaacaagacttacatcgacggaaagatcaaaaacatcagcgagggcgatactaccatccagcgcaattacctgaagggcaactgcacccagtggagcgtgatctactctgggttccagacacctgtcactcacccagtggtcaaagggggagtgcgaaaccagaatgacaaccgggccgaggccttctgtacatcctacggcttctttcccggggagatcaatattacttttatccattacggcaacaaggcccccgacgattctgagcctcagtgcaatcccctgctgcctaccttcgatggcacatttcaccaggggtgctacgtcgctatcttctgcaatcagaactatacttgccgggtgacccatgggaactggactgtggaaatcccaatttcagtcaccagccccgacgattcaagctccggagaggtgccagatcaccccaccgcaaataagagatacaacaccatgacaatctctagtgtgctgctggccctgctgctgtgcgcactgctgttcgcttttctgcattacttcacaactctgaagcagtatctgcggaacctggcatttgcctggcggtacagaaaagtgagatcaagctga

SEQ ID NO: 282 - DNA, 2877 bp, synthetic construct
  source 1..2877: mol_type = other DNA
atggcactccccgtaactgctctgctgctgccgttggcattgctcctgcacgccgcacgcccgtctcgctccgtggccttagctgtgctcgcgctactctctcttagcggcctcgaagctgttatggctccgcggactttattcttaggtggtggcggatccggtggtggcggttctggtggtggcggctccatccagcgtacgcccaaaattcaagtctacagccgacatcctgcagagaacggcaaatctaatttcctgaactgctatgtatcaggctttcaccctagcgatatagaagtggacctgctgaaaaacggagagaggatagaaaaggtcgaacacagcgacctctccttttccaaggactggagcttttatcttctgtattatactgaatttacacccacggaaaaagatgagtatgcgtgccgagtaaaccacgtcacgctgtcacagcccaaaatagtaaaatgggatcgcgacatgggtggtggcggttctggtggtggcggtagtggcggcggaggaagcggtggtggcggttccggatctatgcacgtgctgagatacggatataccggcatcttcgacgatacatcccatatgactctgaccgtggtcgggatttttgacggacagcacttctttacataccatgtgaacagctccgataaggcttctagtcgagcaaatggcaccatctcatggatggccaacgtgagcgcagcctaccccacatatctggacggagaacgcgctaaaggcgatctgatcttcaatcagaccgagcagaacctgctggagctggaaattgctctggggtacaggtctcagagtgtcctgacatggactcacgaatgtaataccacagagaacgggagcttcgtggcaggatatgagggctttgggtgggacggagaaacactgatggagctgaaggataatctgactctgtggaccggccctaactacgaaatcagctggctgaagcagaacaagacttacatcgacggaaagatcaaaaacatcagcgagggcgatactaccatccagcgcaattacctgaagggcaactgcacccagtggagcgtgatctactctgggttccagacacctgtcactcacccagtggtcaaagggggagtgcgaaaccagaatgacaaccgggccgaggccttctgtacatcctacggcttctttcccggggagatcaatattacttttatccattacggcaacaaggcccccgacgattctgagcctcagtgcaatcccctgctgcctaccttcgatggcacatttcaccaggggtgctacgtcgctatcttctgcaatcagaactatacttgccgggtgacccatgggaactggactgtggaaatcccaatttcagtcaccagccccgacgattcaagctccggagaggtgccagatcaccccaccgcaaataagagatacaacaccatgacaatctctagtgtgctgctggccctgctgctgtgcgcactgctgttcgcttttctgcattacttcacaactctgaagcagtatctgcggaacctggcatttgcctggcggtacagaaaagtgagatcaagctgaacgttactggccgaagccgcttggaataaggccggtgtgcgtttgtctatatgttattttccaccatattgccgtcttttggcaatgtgagggcccggaaacctggccctgtcttcttgacgagcattcctaggggtctttcccctctcgccaaaggaatgcaaggtctgttgaatgtcgtgaaggaagcagttcctctggaagcttcttgaagacaaacaacgtctgtagcgaccctttgcaggcagcggaaccccccacctggcgacaggtgcctctgcggccaaaagccacgtgtataagatacacctgcaaaggcggcacaaccccagtgccacgttgtgagttggatagttgtggaaagagtcaaatggctctcctcaagcgtattcaacaaggggctgaaggatgcccagaaggtaccccattgtatgggatctgatctggggcctcggtgcacatgctttacatgtgtttagtcgaggttaaaaaaacgtctaggccccccgaaccacggggacgtggttttcctttgaaaaacacgataataccatggtgagcaagggcgaggagctgttcaccggggtggtgcccatcctggtcgagctggacggcgacgtaaacggccacaagttcagcgtgtccggcgagggcgagggcgatgccacctacggcaagctgaccctgaagttcatctgcaccaccggcaagctgcccgtgccctggcccaccctcgtgaccaccctgacctacggcgtgcagtgcttcagccgctaccccgaccacatgaagcagcacgacttcttcaagtccgccatgcccgaaggctacgtccaggagcgcaccatcttcttcaaggacgacggcaactacaagacccgcgccgaggtgaagttcgagggcgacaccctggtgaaccgcatcgagctgaagggcatcgacttcaaggaggacggcaacatcctggggcacaagctggagtacaactacaacagccacaacgtctatatcatggccgacaagcagaagaacggcatcaaggtgaacttcaagatccgccacaacatcgaggacggcagcgtgcagctcgccgaccactaccagcagaacacccccatcggcgacggccccgtgctgctgcccgacaaccactacctgagcacccagtccgccctgagcaaagaccccaacgagaagcgcgatcacatggtcctgctggagttcgtgaccgccgccgggatcactctcggcatggacgagctgtacaagtaa

SEQ ID NO: 283 - protein, 534 aa, synthetic construct
MALPVTALLLPLALLLHAARPSRSVALAVLALLSLSGLEAVMAPRTLFLGGGGSGGGGSGGGGSIQRTPKIQVYSRHPAENGKSNFLNCYVSGFHPSDIEVDLLKNGERIEKVEHSDLSFSKDWSFYLLYYTEFTPTEKDEYACRVNHVTLSQPKIVKWDRDMGGGGSGGGGSGGGGSGGGGSGSMHVLRYGYTGIFDDTSHMTLTVVGIFDGQHFFTYHVNSSDKASSRANGTISWMANVSAAYPTYLDGERAKGDLIFNQTEQNLLELEIALGYRSQSVLTWTHECNTTENGSFVAGYEGFGWDGETLMELKDNLTLWTGPNYEISWLKQNKTYIDGKIKNISEGDTTIQRNYLKGNCTQWSVIYSGFQTPVTHPVVKGGVRNQNDNRAEAFCTSYGFFPGEINITFIHYGNKAPDDSEPQCNPLLPTFDGTFHQGCYVAIFCNQNYTCRVTHGNWTVEIPISVTSPDDSSSGEVPDHPTANKRYNTMTISSVLLALLLCALLFAFLHYFTTLKQYLRNLAFAWRYRKVRSS

SEQ ID NO: 284 - DNA, 1605 bp, synthetic construct
  source 1..1605: mol_type = other DNA
atggcactccccgtaactgctctgctgctgccgttggcattgctcctgcacgccgcacgcccgtctcgctccgtggccttagctgtgctcgcgctactctctcttagcggcctcgaagctgttatggctccgcggactttattcttaggtggtggcggatccggtggtggcggttctggtggtggcggctccatccagcgtacgcccaaaattcaagtctacagccgacatcctgcagagaacggcaaatctaatttcctgaactgctatgtatcaggctttcaccctagcgatatagaagtggacctgctgaaaaacggagagaggatagaaaaggtcgaacacagcgacctctccttttccaaggactggagcttttatcttctgtattatactgaatttacacccacggaaaaagatgagtatgcgtgccgagtaaaccacgtcacgctgtcacagcccaaaatagtaaaatgggatcgcgacatgggtggtggcggttctggtggtggcggtagtggcggcggaggaagcggtggtggcggttccggatctatgcacgtgctgagatacggatataccggcatcttcgacgatacatcccatatgactctgaccgtggtcgggatttttgacggacagcacttctttacataccatgtgaacagctccgataaggcttctagtcgagcaaatggcaccatctcatggatggccaacgtgagcgcagcctaccccacatatctggacggagaacgcgctaaaggcgatctgatcttcaatcagaccgagcagaacctgctggagctggaaattgctctggggtacaggtctcagagtgtcctgacatggactcacgaatgtaataccacagagaacgggagcttcgtggcaggatatgagggctttgggtgggacggagaaacactgatggagctgaaggataatctgactctgtggaccggccctaactacgaaatcagctggctgaagcagaacaagacttacatcgacggaaagatcaaaaacatcagcgagggcgatactaccatccagcgcaattacctgaagggcaactgcacccagtggagcgtgatctactctgggttccagacacctgtcactcacccagtggtcaaagggggagtgcgaaaccagaatgacaaccgggccgaggccttctgtacatcctacggcttctttcccggggagatcaatattacttttatccattacggcaacaaggcccccgacgattctgagcctcagtgcaatcccctgctgcctaccttcgatggcacatttcaccaggggtgctacgtcgctatcttctgcaatcagaactatacttgccgggtgacccatgggaactggactgtggaaatcccaatttcagtcaccagccccgacgattcaagctccggagaggtgccagatcaccccaccgcaaataagagatacaacaccatgacaatctctagtgtgctgctggccctgctgctgtgcgcactgctgttcgcttttctgcattacttcacaactctgaagcagtatctgcggaacctggcatttgcctggcggtacagaaaagtgagatcaagctga

SEQ ID NO: 285 - protein, 526 aa, synthetic construct [sequence omitted]

SEQ ID NO: 286 - protein, 123 aa, synthetic construct
QLLFNKTKSVEFTFCNDTVVIPCFVTNMEAQNTTEVYVKWKFKGRDIYTFDGALNKSTVPTDFSSAKIEVSQLLKGDASLKMDKSDAVSHTGNYTCEVTELTREGETIIELKYRVVSWFSPNE

SEQ ID NO: 287 - protein, 323 aa, synthetic construct
MWPLVAALLLGSACCGSAQLLFNKTKSVEFTFCNDTVVIPCFVTNMEAQNTTEVYVKWKFKGRDIYTFDGALNKSTVPTDFSSAKIEVSQLLKGDASLKMDKSDAVSHTGNYTCEVTELTREGETIIELKYRVVSWFSPNENILIVIFPIFAILLFWGQFGIKTLKYRSGGMDEKTIALLVAGLVITVIVIVGAILFVPGEYSLKNATGLGLIVTSTGILILLHYYVFSTAIGLTSFVIAILVIQVIAYILAVVGLSLCIAACIPMHGPLLISGLSILALAQLLGLVYMKFVASNQKTIQPPRKAVEEPLNAFKESKGMMNDE

SEQ ID NO: 288 - protein, 12 aa, synthetic construct
CEVTELTREGEC

SEQ ID NO: 289 - protein, 10 aa, synthetic construct
EVTELTREGE

SEQ ID NO: 290 - DNA, 20 bp, synthetic construct
  source 1..20: mol_type = other DNA
cgcgagcacagctaaggcca

SEQ ID NO: 291 - DNA, 20 bp, synthetic construct
  source 1..20: mol_type = other DNA
gagtagcgcgagcacagcta

SEQ ID NO: 292 - DNA, 20 bp, synthetic construct
  source 1..20: mol_type = other DNA
gctactctctctttctggcc

SEQ ID NO: 293 - DNA, 20 bp, synthetic construct
  source 1..20: mol_type = other DNA
ggccgagatgtctcgctccg

SEQ ID NO: 294 - DNA, 20 bp, synthetic construct
  source 1..20: mol_type = other DNA
ggccacggagcgagacatct

SEQ ID NO: 295 - DNA, 20 bp, synthetic construct
  source 1..20: mol_type = other DNA
cacagcccaagatagttaag

SEQ ID NO: 296 - DNA, 20 bp, synthetic construct
  source 1..20: mol_type = other DNA
agtcacatggttcacacggc

SEQ ID NO: 297 - DNA, 20 bp, synthetic construct
  source 1..20: mol_type = other DNA
aagtcaacttcaatgtcgga

SEQ ID NO: 298 - DNA, 20 bp, synthetic construct
  source 1..20: mol_type = other DNA
acttgtctttcagcaaggac

SEQ ID NO: 299 - DNA, 20 bp, synthetic construct
  source 1..20: mol_type = other DNA
tgggctgtgacaaagtcaca

SEQ ID NO: 300 - DNA, 2169 bp, synthetic construct
  source 1..2169: mol_type = other DNA
atggccttaccagtgaccgccttgctcctgccgctggccttgctgctccacgccgccaggccggactacaaagacgatgacgataaaggcggtggtggctctggtggtggcggatcccaggtgcagctggtgcagtctggggctgaggtgaagaagcctggggcctcagtgaaggtctcctgcaaggcttctggatacaccttcaccggccattatttgcactgggtgcgacaggcccctggacaagggcttgagtggatgggatggatcaaccctaacagtggtggcacaaactatgcacagaagtttcagggcagggtcaccatgaccagggacacgtccactagcacagtgtacatggagctgagcagcctgagatctgaggacacggccgtgtattactgtgttagaggaagcggttggtatgacctggactactggggccaagggaccctggtcaccgtctcctcaggtggaggcggttcaggcggaggtggctctggcggtggcggatcggacatccagatgacccagtctccatcctccctgtctgcatctgtaggagacagagtcaccatcacttgccgggcaagtcagaatattggcacatatttagcttggtatcagcagaaaccagggaaagcccctaagctcctgatctatgacgcatccaacttggagactggggtcccatcaaggttcagtggcagtggatctgggacagatttcactctcaccatcagcagtctgcaacctgaagattttgcaacttactactgtcaacagagttacagaatccctctcaccttcggccaagggacacgactggagattaaaaccacgacgccagcgccgcggccaccaacaccggcgcccaccatcgcgtcgcagcccctgtccctgcgcccagaggcgtgccggccagcggcggggggcgcagtgcacacgagggggctggacttcgcctgtgatatctacatctgggcgcccttggccgggacttgtggggtccttctcctgtcactggttatcaccctttactgccggagggaccagaggctgccccccgatgcccacaagccccctgggggaggcagtttccggacccccatccaagaggagcaggccgacgcccactccaccctggccaagatcagagtgaagttcagcaggagcgcagacgcccccgcgtaccagcagggccagaaccagctctataacgagctcaatctaggacgaagagaggagtacgatgttttggacaagagacgtggccgggaccctgagatggggggaaagccgagaaggaagaaccctcaggaaggcctgtacaatgaactgcagaaagataagatggcggaggcctacagtgagattgggatgaaaggcgagcgccggaggggcaaggggcacgatggcctttaccagggtctcagtacagccaccaaggacacctacgacgcccttcacatgcaggccctgccccctcgcggctctggcgagggaaggggttccctgcttacttgcggcgacgtcgaagagaatcccggtccgatggccctcccagtaactgccctccttttgcccctcgcactccttcttcatgccgctcgccccaactgggtcaacgtgattagcgatttgaagaaaatcgaggaccttatacagtctatgcatattgacgctacactgtatactgagagtgatgtacacccgtcctgtaaggtaacggccatgaaatgctttcttctggagctccaggtcatcagcttggagtctggggacgcaagcatccacgatacggttgaaaacctcatcatccttgcgaacaactctctctcatctaatggaaacgttacagagagtgggtgtaaggagtgcgaagagttggaagaaaaaaacatcaaagaatttcttcaatccttcgttcacatagtgcaaatgttcattaacacgtccactaccacacccgccccgaggccacctacgccggcaccgactatcgccagtcaacccctctctctgcgccccgaggcttgccggcctgcggctggtggggcggtccacacccggggcctggattttgcgtgcgatatatacatctgggcacctcttgccggcacctgcggagtgctgcttctctcactcgttattacgctgtactgctaa

SEQ ID NO: 301 - DNA, 2172 bp, synthetic construct
  source 1..2172: mol_type = other DNA
atggccttaccagtgaccgccttgctcctgccgctggccttgctgctccacgccgccaggccggactacaaagacgatgacgataaaggcggtggtggctctggtggtggcggatcccaggtgcagctggtgcagtctggggctgaggtgaagaagcctggggcctcagtgaaggtttcctgcaaggcatctggatacaccttcaccaactactatatgcactgggtgcgacaggcccctggacaagggcttgagtggatgggaataatcaaccctagtggtgggagcacaagctacgcacagaagttccagggcagagtcaccatgaccagggacacgtccacgagcacagtctacatggagctgagcagcctgagatctgaggacacggccgtgtattactgtgctagagaactaggagtcgccgggtacttcgatctctggggccgtggcaccctggtcactgtctcctcaggtggaggcggttcaggcggaggtggctctggcggtggcggatcggacatccagatgacccagtctccatcctccctgtctgcatctgtaggagacagagtcaccatcacttgccgggcgagtcagaggattagcaattggttagcctggtatcagcagaaaccagggaaagcccctaagctcctgatctatgatgcatccaacttggaaaccggggtcccatccaggttcagtggcagtggatctgggacggattttactctcaccatcagcagcctgcagcctgaagattttgcaacttattactgtcaacagacctatagtcctccccctacttttggccaggggaccaagctggagatcaaaaccacgacgccagcgccgcggccaccaacaccggcgcccaccatcgcgtcgcagcccctgtccctgcgcccagaggcgtgccggccagcggcggggggcgcagtgcacacgagggggctggacttcgcctgtgatatctacatctgggcgcccttggccgggacttgtggggtccttctcctgtcactggttatcaccctttactgccggagggaccagaggctgccccccgatgcccacaagccccctgggggaggcagtttccggacccccatccaagaggagcaggccgacgcccactccaccctggccaagatcagagtgaagttcagcaggagcgcagacgcccccgcgtaccagcagggccagaaccagctctataacgagctcaatctaggacgaagagaggagtacgatgttttggacaagagacgtggccgggaccctgagatggggggaaagccgagaaggaagaaccctcaggaaggcctgtacaatgaactgcagaaagataagatggcggaggcctacagtgagattgggatgaaaggcgagcgccggaggggcaaggggcacgatggcctttaccagggtctcagtacagccaccaaggacacctacgacgcccttcacatgcaggccctgccccctcgcggctctggcgagggaaggggttccctgcttacttgcggcgacgtcgaagagaatcccggtccgatggccctcccagtaactgccctccttttgcccctcgcactccttcttcatgccgctcgccccaactgggtcaacgtgattagcgatttgaagaaaatcgaggaccttatacagtctatgcatattgacgctacactgtatactgagagtgatgtacacccgtcctgtaaggtaacggccatgaaatgctttcttctggagctccaggtcatcagcttggagtctggggacgcaagcatccacgatacggttgaaaacctcatcatccttgcgaacaactctctctcatctaatggaaacgttacagagagtgggtgtaaggagtgcgaagagttggaagaaaaaaacatcaaagaatttcttcaatccttcgttcacatagtgcaaatgttcattaacacgtccactaccacacccgccccgaggccacctacgccggcaccgactatcgccagtcaacccctctctctgcgccccgaggcttgccggcctgcggctggtggggcggtccacacccggggcctggattttgcgtgcgatatatacatctgggcacctcttgccggcacctgcggagtgctgcttctctcactcgttattacgctgtactgctaa

SEQ ID NO: 302 - DNA, 2199 bp, synthetic construct
  source 1..2199: mol_type = other DNA
atggccttaccagtgaccgccttgctcctgccgctggccttgctgctccacgccgccaggccggactacaaagacgatgacgataaaggcggtggtggctctggtggtggcggatcccaggtgcagctggtgcagtctggggctgaggtgaagaagcctggggcctcagtgaaggtttcctgcaaggcatctggatacaccttcaccggttactatatccactgggtgcgacaggcccctggacaagggcttgagtggatgggaataatcaaccctagtggtggaagcacaagctacgcacagaagttccagggcagagtcaccatgaccagggacacgtccacgagcacagtctacatggagctgagcagcctgagatctgaggacacggccgtgtattactgtgctagagacctgtcagggatcgacggatatattggtttctttgactactggggccaagggaccctggtcaccgtctcctcaggtggaggcggttcaggcggaggtggctctggcggtggcggatcggatattgtgatgactcagtctccactctccctgcccgtcacccctggagagccggcctccatctcctgcaggtctagtcagagcctcctgcactctaacggatacaactatttggattggtacctgcagaagccagggcagtctccacagctcctgatctatgcagcctcttcattacaatccggggtccctgacaggttcagtggcagtggatcaggcacagattttacactgaaaatcagcagagtggaggctgaggatgttggggtttattactgcatgcaagctctacaaactcctatcaccttcggccaagggacacgactggagattaaaaccacgacgccagcgccgcggccaccaacaccggcgcccaccatcgcgtcgcagcccctgtccctgcgcccagaggcgtgccggccagcggcggggggcgcagtgcacacgagggggctggacttcgcctgtgatatctacatctgggcgcccttggccgggacttgtggggtccttctcctgtcactggttatcaccctttactgccggagggaccagaggctgccccccgatgcccacaagccccctgggggaggcagtttccggacccccatccaagaggagcaggccgacgcccactccaccctggccaagatcagagtgaagttcagcaggagcgcagacgcccccgcgtaccagcagggccagaaccagctctataacgagctcaatctaggacgaagagaggagtacgatgttttggacaagagacgtggccgggaccctgagatggggggaaagccgagaaggaagaaccctcaggaaggcctgtacaatgaactgcagaaagataagatggcggaggcctacagtgagattgggatgaaaggcgagcgccggaggggcaaggggcacgatggcctttaccagggtctcagtacagccaccaaggacacctacgacgcccttcacatgcaggccctgccccctcgcggctctggcgagggaaggggttccctgcttacttgcggcgacgtcgaagagaatcccggtccgatggccctcccagtaactgccctccttttgcccctcgcactccttcttcatgccgctcgccccaactgggtcaacgtgattagcgatttgaagaaaatcgaggaccttatacagtctatgcatattgacgctacactgtatactgagagtgatgtacacccgtcctgtaaggtaacggccatgaaatgctttcttctggagctccaggtcatcagcttggagtctggggacgcaagcatccacgatacggttgaaaacctcatcatccttgcgaacaactctctctcatctaatggaaacgttacagagagtgggtgtaaggagtgcgaagagttggaagaaaaaaacatcaaagaatttcttcaatccttcgttcacatagtgcaaatgttcattaacacgtccactaccacacccgccccgaggccacctacgccggcaccgactatcgccagtcaacccctctctctgcgccccgaggcttgccggcctgcggctggtggggcggtccacacccggggcctggattttgcgtgcgatatatacatctgggcacctcttgccggcacctgcggagtgctgcttctctcactcgttattacgctgtactgctaa

SEQ ID NO: 303 - DNA, 2172 bp, synthetic construct
  source 1..2172: mol_type = other DNA
atggccttaccagtgaccgccttgctcctgccgctggccttgctgctccacgccgccaggccggactacaaagacgatgacgataaaggcggtggtggctctggtggtggcggatcccaggtgcagctggtgcagtctggggctgaggtgaagaagcctggggcctcagtgaaggtttcctgcaaggcatctggaggaaccttcagaagccatgtcatatcctgggtgcgacaggcccctggacaagggcttgagtggatgggaataatcgatcctagtggtggcagcacaagctacgcacagaggttccagggcagagtcaccatgaccagggacacgtccacgagcacagtctacatggagctgagcagcctgagatctgaggacacggccgtgtattactgtgctaaagattacactgggctgcttggaatggatgtctggggccaagggacaaccgtcaccgtctcttcaggtggaggcggttcaggcggaggtggctctggcggtggcggatcggacatccagatgacccagtctccatcctccctgtctgcatctgtaggagacagagtcaccatcacttgccgggcaagtcaggacattgacacctatttagcctggtatcagcagaaaccagggaaagcccctaagctcctgatctatgctgcatccagtttgcaaagtggggtcccatcaaggttcagtggcagtggatctgggacagatttcactctcaccatcagcagtctgcaacctgaagattttgcaacttactactgtcaacagagttacacaacccctttcacgttcggccaagggaccaaggtggaaatcaaaaccacgacgccagcgccgcggccaccaacaccggcgcccaccatcgcgtcgcagcccctgtccctgcgcccagaggcgtgccggccagcggcggggggcgcagtgcacacgagggggctggacttcgcctgtgatatctacatctgggcgcccttggccgggacttgtggggtccttctcctgtcactggttatcaccctttactgccggagggaccagaggctgccccccgatgcccacaagccccctgggggaggcagtttccggacccccatccaagaggagcaggccgacgcccactccaccctggccaagatcagagtgaagttcagcaggagcgcagacgcccccgcgtaccagcagggccagaaccagctctataacgagctcaatctaggacgaagagaggagtacgatgttttggacaagagacgtggccgggaccctgagatggggggaaagccgagaaggaagaaccctcaggaaggcctgtacaatgaactgcagaaagataagatggcggaggcctacagtgagattgggatgaaaggcgagcgccggaggggcaaggggcacgatggcctttaccagggtctcagtacagccaccaaggacacctacgacgcccttcacatgcaggccctgccccctcgcggctctggcgagggaaggggttccctgcttacttgcggcgacgtcgaagagaatcccggtccgatggccctcccagtaactgccctccttttgcccctcgcactccttcttcatgccgctcgccccaactgggtcaacgtgattagcgatttgaagaaaatcgaggaccttatacagtctatgcatattgacgctacactgtatactgagagtgatgtacacccgtcctgtaaggtaacggccatgaaatgctttcttctggagctccaggtcatcagcttggagtctggggacgcaagcatccacgatacggttgaaaacctcatcatccttgcgaacaactctctctcatctaatggaaacgttacagagagtgggtgtaaggagtgcgaagagttggaagaaaaaaacatcaaagaatttcttcaatccttcgttcacatagtgcaaatgttcattaacacgtccactaccacacccgccccgaggccacctacgccggcaccgactatcgccagtcaacccctctctctgcgccccgaggcttgccggcctgcggctggtggggcggtccacacccggggcctggattttgcgtgcgatatatacatctgggcacctcttgccggcacctgcggagtgctgcttctctcactcgttattacgctgtactgctaa

SEQ ID NO: 304 - DNA, 2172 bp, synthetic construct
  source 1..2172: mol_type = other DNA
atggccttaccagtgaccgccttgctcctgccgctggccttgctgctccacgccgccaggccggactacaaagacgatgacgataaaggcggtggtggctctggtggtggcggatcccaggtgcagctggtgcagtctggggctgaggtgaagaagcctggggcctcagtgaaggtctcctgcaaggcttctggatacaccttcatcgactattatatccattgggtgcgacaggcccctggacaagggcttgagtggatgggatggatgaaccccaacagtggtaacacaggctatgcacagaagttccagggcagagtcaccatgaccagggacacctccacaagcacagtctacatggagctgagcagcctgagatctgaggacacggccgtgtattactgtgcgagaggcctttccggctacgacttggacgactactggggccaagggaccctggtcaccgtctcctcaggtggaggcggttcaggcggaggtggctctggcggtggcggatcggacatccagatgacccagtctccatcctccctgtctgcatctgtaggagacagagtcaccatcacttgccaggcaagtcaggacattagcaactatttaaattggtatcagcagaaaccagggaaagcccctaagctcctgatctatgatgcatccagtttggaaagtggggtcccatcaaggttcagtggcagtggatctgggacagatttcactctcaccatcagcagtctgcaacctgaagattttgcaacttactactgtcaacagagttaccgatcacctctcactttcggcggagggaccaaggtggagatcaaaaccacgacgccagcgccgcggccaccaacaccggcgcccaccatcgcgtcgcagcccctgtccctgcgcccagaggcgtgccggccagcggcggggggcgcagtgcacacgagggggctggacttcgcctgtgatatctacatctgggcgcccttggccgggacttgtggggtccttctcctgtcactggttatcaccctttactgccggagggaccagaggctgccccccgatgcccacaagccccctgggggaggcagtttccggacccccatccaagaggagcaggccgacgcccactccaccctggccaagatcagagtgaagttcagcaggagcgcagacgcccccgcgtaccagcagggccagaaccagctctataacgagctcaatctaggacgaagagaggagtacgatgttttggacaagagacgtggccgggaccctgagatggggggaaagccgagaaggaagaaccctcaggaaggcctgtacaatgaactgcagaaagataagatggcggaggcctacagtgagattgggatgaaaggcgagcgccggaggggcaaggggcacgatggcctttaccagggtctcagtacagccaccaaggacacctacgacgcccttcacatgcaggccctgccccctcgcggctctggcgagggaaggggttccctgcttacttgcggcgacgtcgaagagaatcccggtccgatggccctcccagtaactgccctccttttgcccctcgcactccttcttcatgccgctcgccccaactgggtcaacgtgattagcgatttgaagaaaatcgaggaccttatacagtctatgcatattgacgctacactgtatactgagagtgatgtacacccgtcctgtaaggtaacggccatgaaatgctttcttctggagctccaggtcatcagcttggagtctggggacgcaagcatccacgatacggttgaaaacctcatcatccttgcgaacaactctctctcatctaatggaaacgttacagagagtgggtgtaaggagtgcgaagagttggaagaaaaaaacatcaaagaatttcttcaatccttcgttcacatagtgcaaatgttcattaacacgtccactaccacacccgccccgaggccacctacgccggcaccgactatcgccagtcaacccctctctctgcgccccgaggcttgccggcctgcggctggtggggcggtccacacccggggcctggattttgcgtgcgatatatacatctgggcacctcttgccggcacctgcggagtgctgcttctctcactcgttattacgctgtactgctaa

SEQ ID NO: 305 - DNA, 2169 bp, synthetic construct
  source 1..2169: mol_type = other DNA
atggccttaccagtgaccgccttgctcctgccgctggccttgctgctccacgccgccaggccggactacaaagacgatgacgataaaggcggtggtggctctggtggtggcggatcccaggtgcagctggtgcagtctggggctgaggtgaagaagcctggggcctcagtgaaggtttcctgcaaggcatctggatacaccttcaccagctactatatgcactgggtgcgacaggcccctggacaagggcttgagtggatgggatggatcaacccgaacagtggtggcacaaaatacgcacataagttccagggcagagtcaccatgaccagggacacgtccacgagcacagtctacatggagctgagcagcctgagatctgaggacacggccgtgtattactgtgctagaggactgtcaggttacgattttgactactggggccaagggaccacagtcaccgtctcctcaggtggaggcggttcaggcggaggtggctctggcggtggcggatcggacatccagatgacccagtctccatcctccctgtctgcatctgtaggagacagagtcaccatcacttgccaggcgagtcaggacattagcaactatttaaattggtatcagcagaaaccagggaaagcccctaagctcctgatctacgatgcatccaatttggaaacaggggtcccatcaaggttcagtggaagtggatctgggacagattttactttgaccatcagcagcctgcagcctgaagattttgcaacatattactgtcaacaggcttataggtggcctatcaccttcggccaagggacacgactggagattaaaaccacgacgccagcgccgcggccaccaacaccggcgcccaccatcgcgtcgcagcccctgtccctgcgcccagaggcgtgccggccagcggcggggggcgcagtgcacacgagggggctggacttcgcctgtgatatctacatctgggcgcccttggccgggacttgtggggtccttctcctgtcactggttatcaccctttactgccggagggaccagaggctgccccccgatgcccacaagccccctgggggaggcagtttccggacccccatccaagaggagcaggccgacgcccactccaccctggccaagatcagagtgaagttcagcaggagcgcagacgcccccgcgtaccagcagggccagaaccagctctataacgagctcaatctaggacgaagagaggagtacgatgttttggacaagagacgtggccgggaccctgagatggggggaaagccgagaaggaagaaccctcaggaaggcctgtacaatgaactgcagaaagataagatggcggaggcctacagtgagattgggatgaaaggcgagcgccggaggggcaaggggcacgatggcctttaccagggtctcagtacagccaccaaggacacctacgacgcccttcacatgcaggccctgccccctcgcggctctggcgagggaaggggttccctgcttacttgcggcgacgtcgaagagaatcccggtccgatggccctcccagtaactgccctccttttgcccctcgcactccttcttcatgccgctcgccccaactgggtcaacgtgattagcgatttgaagaaaatcgaggaccttatacagtctatgcatattgacgctacactgtatactgagagtgatgtacacccgtcctgtaaggtaacggccatgaaatgctttcttctggagctccaggtcatcagcttggagtctggggacgcaagcatccacgatacggttgaaaacctcatcatccttgcgaacaactctctctcatctaatggaaacgttacagagagtgggtgtaaggagtgcgaagagttggaagaaaaaaacatcaaagaatttcttcaatccttcgttcacatagtgcaaatgttcattaacacgtccactaccacacccgccccgaggccacctacgccggcaccgactatcgccagtcaacccctctctctgcgccccgaggcttgccggcctgcggctggtggggcggtccacacccggggcctggattttgcgtgcgatatatacatctgggcacctcttgccggcacctgcggagtgctgcttctctcactcgttattacgctgtactgctaa

SEQ ID NO: 306 - DNA, 2172 bp, synthetic construct
  source 1..2172: mol_type = other DNA
atggccttaccagtgaccgccttgctcctgccgctggccttgctgctccacgccgccaggccggactacaaagacgatgacgataaaggcggtggtggctctggtggtggcggatcccaggtgcagctggtgcagtctggggctgaggtgaagaagcctggggcctcagtgaaggtttcctgcaaggcatctggatacaccttcaccggctactatatgcactgggtgcgacaggcccctggacaagggcttgagtggatgggatggatgaaccctaatagtggtaacacaggctacgcacagaagttccagggcagagtcaccatgaccagggacacgtccacgagcacagtctacatggagctgagcagcctgagatctgaggacacggccgtgtattactgtgctagagggaccgacgtgtatggagactttgactactggggccaagggaccctggtcaccgtctcctcaggtggaggcggttcaggcggaggtggctctggcggtggcggatcggacatccagatgacccagtctccatcctccctgtctgcatctgtaggagacagagtcaccatcacttgccgggcaagtcagagcattagcagctatttaaattggtatcagcagaaaccagggaaagcccctaagctcctgatctatgatgcatcctacttggaaacaggggtcccatcaaggttcagtggcagtggatctgggacagatttcactctcaccatcagcagtctgcaacctgaagattttgcaacttactactgtcaacagagttacacaattcctcctacgttcggccaagggaccaaggtggaaatcaaaaccacgacgccagcgccgcggccaccaacaccggcgcccaccatcgcgtcgcagcccctgtccctgcgcccagaggcgtgccggccagcggcggggggcgcagtgcacacgagggggctggacttcgcctgtgatatctacatctgggcgcccttggccgggacttgtggggtccttctcctgtcactggttatcaccctttactgccggagggaccagaggctgccccccgatgcccacaagccccctgggggaggcagtttccggacccccatccaagaggagcaggccgacgcccactccaccctggccaagatcagagtgaagttcagcaggagcgcagacgcccccgcgtaccagcagggccagaaccagctctataacgagctcaatctaggacgaagagaggagtacgatgttttggacaagagacgtggccgggaccctgagatggggggaaagccgagaaggaagaaccctcaggaaggcctgtacaatgaactgcagaaagataagatggcggaggcctacagtgagattgggatgaaaggcgagcgccggaggggcaaggggcacgatggcctttaccagggtctcagtacagccaccaaggacacctacgacgcccttcacatgcaggccctgccccctcgcggctctggcgagggaaggggttccctgcttacttgcggcgacgtcgaagagaatcccggtccgatggccctcccagtaactgccctccttttgcccctcgcactccttcttcatgccgctcgccccaactgggtcaacgtgattagcgatttgaagaaaatcgaggaccttatacagtctatgcatattgacgctacactgtatactgagagtgatgtacacccgtcctgtaaggtaacggccatgaaatgctttcttctggagctccaggtcatcagcttggagtctggggacgcaagcatccacgatacggttgaaaacctcatcatccttgcgaacaactctctctcatctaatggaaacgttacagagagtgggtgtaaggagtgcgaagagttggaagaaaaaaacatcaaagaatttcttcaatccttcgttcacatagtgcaaatgttcattaacacgtccactaccacacccgccccgaggccacctacgccggcaccgactatcgccagtcaacccctctctctgcgccccgaggcttgccggcctgcggctggtggggcggtccacacccggggcctggattttgcgtgcgatatatacatctgggcacctcttgccggcacctgcggagtgctgcttctctcactcgttattacgctgtactgctaa

SEQ ID NO: 307 - DNA, 2193 bp, synthetic construct
  source 1..2193: mol_type = other DNA
atggccttaccagtgaccgccttgctcctgccgctggccttgctgctccacgccgccaggccggactacaaagacgatgacgataaaggcggtggtggctctggtggtggcggatcccaggtgcagctggtgcagtctggggctgaggtgaagaagcctgggtcctcggtgaaggtctcctgcaaggcttctggatacaccttcacagagaacgaaatgcattgggtgcgacaggcccctggacaagggcttgagtggatgggaggcatcatccctatctttggtacagcaaactacgcacagaagttccagggcagagtcacgattaccgcggacgaatccacgagcacagcctacatggagctgagcagcctgagatctgaggacacggccgtgtattactgtgcgagagagggaggaaccgccatggccaccggttattactactatgggatggacgtgtggggccaagggaccaccgtcaccgtctcctcaggtggaggcggttcaggcggaggtggctctggcggtggcggatcggacatccagatgacccagtctccatcctccctgtctgcatctgtaggagacagagtcaccatcacttgccaggcgagtcaggacattagcaactatttaaattggtatcagcagaaaccagggaaagcccctaagctcctgatctacgatgcatccaatttggaaacaggggtcccatcaaggttcagtggaagtggatctgggacagattttactctcaccatcagcagcctgcagcctgaagattttgcaacatattactgtcaacagagctattccacccctctcactttcggccaggggaccaaggtggagatcaaaaccacgacgccagcgccgcggccaccaacaccggcgcccaccatcgcgtcgcagcccctgtccctgcgcccagaggcgtgccggccagcggcggggggcgcagtgcacacgagggggctggacttcgcctgtgatatctacatctgggcgcccttggccgggacttgtggggtccttctcctgtcactggttatcaccctttactgccggagggaccagaggctgccccccgatgcccacaagccccctgggggaggcagtttccggacccccatccaagaggagcaggccgacgcccactccaccctggccaagatcagagtgaagttcagcaggagcgcagacgcccccgcgtaccagcagggccagaaccagctctataacgagctcaatctaggacgaagagaggagtacgatgttttggacaagagacgtggccgggaccctgagatggggggaaagccgagaaggaagaaccctcaggaaggcctgtacaatgaactgcagaaagataagatggcggaggcctacagtgagattgggatgaaaggcgagcgccggaggggcaaggggcacgatggcctttaccagggtctcagtacagccaccaaggacacctacgacgcccttcacatgcaggccctgccccctcgcggctctggcgagggaaggggttccctgcttacttgcggcgacgtcgaagagaatcccggtccgatggccctcccagtaactgccctccttttgcccctcgcactccttcttcatgccgctcgccccaactgggtcaacgtgattagcgatttgaagaaaatcgaggaccttatacagtctatgcatattgacgctacactgtatactgagagtgatgtacacccgtcctgtaaggtaacggccatgaaatgctttcttctggagctccaggtcatcagcttggagtctggggacgcaagcatccacgatacggttgaaaacctcatcatccttgcgaacaactctctctcatctaatggaaacgttacagagagtgggtgtaaggagtgcgaagagttggaagaaaaaaacatcaaagaatttcttcaatccttcgttcacatagtgcaaatgttcattaacacgtccactaccacacccgccccgaggccacctacgccggcaccgactatcgccagtcaacccctctctctgcgccccgaggcttgccggcctgcggctggtggggcggtccacacccggggcctggattttgcgtgcgatatatacatctgggcacctcttgccggcacctgcggagtgctgcttctctcactcgttattacgctgtactgctaa

SEQ ID NO: 308 - DNA, 2187 bp, synthetic construct
  source 1..2187: mol_type = other DNA
atggccttaccagtgaccgccttgctcctgccgctggccttgctgctccacgccgccaggccggactacaaagacgatgacgataaaggcggtggtggctctggtggtggcggatcccaggtgcagctggtgcagtctggggctgaggtgaagaagcctggggcctcagtgaaggtttcctgcaaggcatctggatacaccttcaccgagaatgaaatgcactgggtgcgacaggcccctggacaagggcttgagtggatgggatggatcaactctaatggtggctacacagggtacgcactgaagttccagggcagagtcaccatgaccagggacacgtccacgagcacagtctacatggagctgagcagcctgagatctgaggacacggccgtgtattactgtgctagagccagtaattacggaggacactttgactactggggccaagggaccctggtcaccgtctcctcaggtggaggcggttcaggcggaggtggctctggcggtggcggatcggatattgtgatgactcagtctccactctccctgcccgtcacccctggagagccggcctccatctcctgcaggtctagtcagagcctcctgcattccaacggatacaactatttggattggtacctgcagaagccagggcagtctccacagctcctgatctatcaggcatctagcctggagtccggggtccctgacaggttcagtggcagtggatcaggcacagattttacactgaaaatcagcagagtggaggctgaggatgttggggtttattactgcatgcaaggaacgcactggcctccaactttcggcggagggaccaaggtggagatcaaaaccacgacgccagcgccgcggccaccaacaccggcgcccaccatcgcgtcgcagcccctgtccctgcgcccagaggcgtgccggccagcggcggggggcgcagtgcacacgagggggctggacttcgcctgtgatatctacatctgggcgcccttggccgggacttgtggggtccttctcctgtcactggttatcaccctttactgccggagggaccagaggctgccccccgatgcccacaagccccctgggggaggcagtttccggacccccatccaagaggagcaggccgacgcccactccaccctggccaagatcagagtgaagttcagcaggagcgcagacgcccccgcgtaccagcagggccagaaccagctctataacgagctcaatctaggacgaagagaggagtacgatgttttggacaagagacgtggccgggaccctgagatggggggaaagccgagaaggaagaaccctcaggaaggcctgtacaatgaactgcagaaagataagatggcggaggcctacagtgagattgggatgaaaggcgagcgccggaggggcaaggggcacgatggcctttaccagggtctcagtacagccaccaaggacacctacgacgcccttcacatgcaggccctgccccctcgcggctctggcgagggaaggggttccctgcttacttgcggcgacgtcgaagagaatcccggtccgatggccctcccagtaactgccctccttttgcccctcgcactccttcttcatgccgctcgccccaactgggtcaacgtgattagcgatttgaagaaaatcgaggaccttatacagtctatgcatattgacgctacactgtatactgagagtgatgtacacccgtcctgtaaggtaacggccatgaaatgctttcttctggagctccaggtcatcagcttggagtctggggacgcaagcatccacgatacggttgaaaacctcatcatccttgcgaacaactctctctcatctaatggaaacgttacagagagtgggtgtaaggagtgcgaagagttggaagaaaaaaacatcaaagaatttcttcaatccttcgttcacatagtgcaaatgttcattaacacgtccactaccacacccgccccgaggccacctacgccggcaccgactatcgccagtcaacccctctctctgcgccccgaggcttgccggcctgcggctggtggggcggtccacacccggggcctggattttgcgtgcgatatatacatctgggcacctcttgccggcacctgcggagtgctgcttctctcactcgttattacgctgtactgctaa

SEQ ID NO: 309 - DNA, 2172 bp, synthetic construct
  source 1..2172: mol_type = other DNA
atggccttaccagtgaccgccttgctcctgccgctggccttgctgctccacgccgccaggccggactacaaagacgatgacgataaaggcggtggtggctctggtggtggcggatcccaggtgcagctggtgcagtctggggctgaggtgaagaagcctggggcctcagtgaaggtttcctgcaaggcatctggatacaccttcaccagctactatatgcactgggtgcgacaggcccctggacaagggcttgagtggatgggaataatcaaccctagtggtggcagcacaatatacgcacagaagttccagggcagagtcaccatgaccagggacacgtccacgagcacagtctacatggagctgagcagcctgagatctgaggacacggccgtgtattactgtgctaaagacatgggagcgtgggcagctggttttgactactggggccaagggaccctggtcaccgtctcctcaggtggaggcggttcaggcggaggtggctctggcggtggcggatcggacatccagatgacccagtctccatcctccctgtctgcatctgtaggagacagagtcaccatcacttgccaagcaagtcaggacattagcaactatttaaattggtatcagcagaaaccagggaaagcccctaagctcctgatctatgctacctccaccttggctaacggggtcccatcaaggttcagtggcagtggatctgggacagatttcactctcaccatcagcagtctgcaacctgaagattttgcaacttactactgtcaacagagttacagtacgcttaccttcggccaagggacacgactggagattaaaaccacgacgccagcgccgcggccaccaacaccggcgcccaccatcgcgtcgcagcccctgtccctgcgcccagaggcgtgccggccagcggcggggggcgcagtgcacacgagggggctggacttcgcctgtgatatctacatctgggcgcccttggccgggacttgtggggtccttctcctgtcactggttatcaccctttactgccggagggaccagaggctgccccccgatgcccacaagccccctgggggaggcagtttccggacccccatccaagaggagcaggccgacgcccactccaccctggccaagatcagagtgaagttcagcaggagcgcagacgcccccgcgtaccagcagggccagaaccagctctataacgagctcaatctaggacgaagagaggagtacgatgttttggacaagagacgtggccgggaccctgagatggggggaaagccgagaaggaagaaccctcaggaaggcctgtacaatgaactgcagaaagataagatggcggaggcctacagtgagattgggatgaaaggcgagcgccggaggggcaaggggcacgatggcctttaccagggtctcagtacagccaccaaggacacctacgacgcccttcacatgcaggccctgccccctcgcggctctggcgagggaaggggttccctgcttacttgcggcgacgtcgaagagaatcccggtccgatggccctcccagtaactgccctccttttgcccctcgcactccttcttcatgccgctcgccccaactgggtcaacgtgattagcgatttgaagaaaatcgaggaccttatacagtctatgcatattgacgctacactgtatactgagagtgatgtacacccgtcctgtaaggtaacggccatgaaatgctttcttctggagctccaggtcatcagcttggagtctggggacgcaagcatccacgatacggttgaaaacctcatcatccttgcgaacaactctctctcatctaatggaaacgttacagagagtgggtgtaaggagtgcgaagagttggaagaaaaaaacatcaaagaatttcttcaatccttcgttcacatagtgcaaatgttcattaacacgtccactaccacacccgccccgaggccacctacgccggcaccgactatcgccagtcaacccctctctctgcgccccgaggcttgccggcctgcggctggtggggcggtccacacccggggcctggattttgcgtgcgatatatacatctgggcacctcttgccggcacctgcggagtgctgcttctctcactcgttattacgctgtactgctaa

SEQ ID NO: 310 - DNA, 2175 bp, synthetic construct
  source 1..2175: mol_type = other DNA
atggccttaccagtgaccgccttgctcctgccgctggccttgctgctccacgccgccaggccggactacaaagacgatgacgataaaggcggtggtggctctggtggtggcggatcccaggtgcagctggtgcagtctggggctgaggtgaagaagcctggggcctcagtgaaggtttcctgcaaggcatctggatacaccttcaccgggtactatatgcactgggtgcgacaggcccctggacaagggcttgagtggatgggatggatcaacccaaatagtggtgatacagggtacgcacagaagttccagggcagagtcaccatgaccagggacacgtccacgagcacagtctacatggagctgagcagcctgagatctgaggacacggccgtgtattactgtgctagatccgtcaacgactacggtgattacgacggttactggggccaagggaccctggtcaccgtctcctcaggtggaggcggttcaggcggaggtggctctggcggtggcggatcggacatccagatgacccagtctccatcctccctgtctgcatctgtaggagacagagtcaccatcacttgccaggcgagtcaggacattagcaactatttaaattggtatcagcagaaaccagggaaagcccctaagctcctgatctacgatgcatccaatttggaaacaggggtcccatcaaggttcagtggaagtggatctgggacagattttactctgaccatcagcagcctgcagcctgaagattttgcaacatattactgtcaacagtcttacagtacgcctcctacgttcggccaagggaccaaggtggaaatcaaaaccacgacgccagcgccgcggccaccaacaccggcgcccaccatcgcgtcgcagcccctgtccctgcgcccagaggcgtgccggccagcggcggggggcgcagtgcacacgagggggctggacttcgcctgtgatatctacatctgggcgcccttggccgggacttgtggggtccttctcctgtcactggttatcaccctttactgccggagggaccagaggctgccccccgatgcccacaagccccctgggggaggcagtttccggacccccatccaagaggagcaggccgacgcccactccaccctggccaagatcagagtgaagttcagcaggagcgcagacgcccccgcgtaccagcagggccagaaccagctctataacgagctcaatctaggacgaagagaggagtacgatgttttggacaagagacgtggccgggaccctgagatggggggaaagccgagaaggaagaaccctcaggaaggcctgtacaatgaactgcagaaagataagatggcggaggcctacagtgagattgggatgaaaggcgagcgccggaggggcaaggggcacgatggcctttaccagggtctcagtacagccaccaaggacacctacgacgcccttcacatgcaggccctgccccctcgcggctctggcgagggaaggggttccctgcttacttgcggcgacgtcgaagagaatcccggtccgatggccctcccagtaactgccctccttttgcccctcgcactccttcttcatgccgctcgccccaactgggtcaacgtgattagcgatttgaagaaaatcgaggaccttatacagtctatgcatattgacgctacactgtatactgagagtgatgtacacccgtcctgtaaggtaacggccatgaaatgctttcttctggagctccaggtcatcagcttggagtctggggacgcaagcatccacgatacggttgaaaacctcatcatccttgcgaacaactctctctcatctaatggaaacgttacagagagtgggtgtaaggagtgcgaagagttggaagaaaaaaacatcaaagaatttcttcaatccttcgttcacatagtgcaaatgttcattaacacgtccactaccacacccgccccgaggccacctacgccggcaccgactatcgccagtcaacccctctctctgcgccccgaggcttgccggcctgcggctggtggggcggtccacacccggggcctggattttgcgtgcgatatatacatctgggcacctcttgccggcacctgcggagtgctgcttctctcactcgttattacgctgtactgctaa

SEQ ID NO: 311 - DNA, 2175 bp, synthetic construct
  source 1..2175: mol_type = other DNA
atggccttaccagtgaccgccttgctcctgccgctggccttgctgctccacgccgccaggccggactacaaagacgatgacgataaaggcggtggtggctctggtggtggcggatcccaggtgcagctggtgcagtctggggctgaggtgaagaagcctggggcctcagtgaaggtttcctgcaaggcatctggatacaccttcaccggatactatatgcactgggtgcgacaggcccctggacaagggcttgagtggatgggaataatcaaccctagtggtgggagcacaagctacgcacagaagttccagggcagagtcaccatgaccagggacacgtccacgagcacagtctacatggagctgagcagcctgagatctgaggacacggccgtgtattactgtgctagagattacggtgattatgacgcctcgtttgactactggggccaagggaccctggtcaccgtctcctcaggtggaggcggttcaggcggaggtggctctggcggtggcggatcggacatccagatgacccagtctccatcctccctgtctgcatctgtaggagacagagtcaccatcacttgccgggcaagtcagagcattgacaattggttagcgtggtatcagcagaaaccagggaaagcccctaagctcctgatctatgctgcatccacattgcaaagtggggtcccatcaaggttcagtggcagtggatctgggacagatttcactctcaccatcagcagtctgcaacctgaagattttgcaacttactactgtcaacagagttacgatagtcctcccacttttggccaggggaccaagctggagatcaaaaccacgacgccagcgccgcggccaccaacaccggcgcccaccatcgcgtcgcagcccctgtccctgcgcccagaggcgtgccggccagcggcggggggcgcagtgcacacgagggggctggacttcgcctgtgatatctacatctgggcgcccttggccgggacttgtggggtccttctcctgtcactggttatcaccctttactgccggagggaccagaggctgccccccgatgcccacaagccccctgggggaggcagtttccggacccccatccaagaggagcaggccgacgcccactccaccctggccaagatcagagtgaagttcagcaggagcgcagacgcccccgcgtaccagcagggccagaaccagctctataacgagctcaatctaggacgaagagaggagtacgatgttttggacaagagacgtggccgggaccctgagatggggggaaagccgagaaggaagaaccctcaggaaggcctgtacaatgaactgcagaaagataagatggcggaggcctacagtgagattgggatgaaaggcgagcgccggaggggcaaggggcacgatggcctttaccagggtctcagtacagccaccaaggacacctacgacgcccttcacatgcaggccctgccccctcgcggctctggcgagggaaggggttccctgcttacttgcggcgacgtcgaagagaatcccggtccgatggccctcccagtaactgccctccttttgcccctcgcactccttcttcatgccgctcgccccaactgggtcaacgtgattagcgatttgaagaaaatcgaggaccttatacagtctatgcatattgacgctacactgtatactgagagtgatgtacacccgtcctgtaaggtaacggccatgaaatgctttcttctggagctccaggtcatcagcttggagtctggggacgcaagcatccacgatacggttgaaaacctcatcatccttgcgaacaactctctctcatctaatggaaacgttacagagagtgggtgtaaggagtgcgaagagttggaagaaaaaaacatcaaagaatttcttcaatccttcgttcacatagtgcaaatgttcattaacacgtccactaccacacccgccccgaggccacctacgccggcaccgactatcgccagtcaacccctctctctgcgccccgaggcttgccggcctgcggctggtggggcggtccacacccggggcctggattttgcgtgcgatatatacatctgggcacctcttgccggcacctgcggagtgctgcttctctcactcgttattacgctgtactgctaa

SEQ ID NO: 312 - DNA, 2166 bp, synthetic construct
  source 1..2166: mol_type = other DNA
atggccttaccagtgaccgccttgctcctgccgctggccttgctgctccacgccgccaggccggactacaaagacgatgacgataaaggcggtggtggctctggtggtggcggatcccaggtgcagctggtgcagtctggggctgaggtgaagaagcctggggcctcagtgaaggtttcctgcaaggcatctggatacaccttcaccagctacgatatcaattgggtgcgacaggcccctggacaagggcttgagtggatgggaataatcaacccctccgatggtagcacaatctacgcacagaacttccagggcagagtcaccatgaccagggacacgtccacgagcacagtctacatggagctgagcagcctgagatctgaggacacggccgtgtattactgtgtgaaggaagaggcctggtacttcgatctctggggccgtggcaccctggtcactgtctcctcaggtggaggcggttcaggcggaggtggctctggcggtggcggatcggacatccagatgacccagtctccatcctccctgtctgcatctgtaggagacagagtcaccatcacttgccaggcgagtcaggacattagcaactatttaaattggtatcagcagaaaccagggaaagcccctaagctcctgatctacgatgcatccaatttggaaacaggggtcccatcaaggttcagtggaagtggatctgggacagattttactttgaccatcagcagcctgcagcctgaagattttgcaacatattactgtcaacagtcctatagcacccctctcactttcggcggagggaccaaggtggagatcaaaaccacgacgccagcgccgcggccaccaacaccggcgcccaccatcgcgtcgcagcccctgtccctgcgcccagaggcgtgccggccagcggcggggggcgcagtgcacacgagggggctggacttcgcctgtgatatctacatctgggcgcccttggccgggacttgtggggtccttctcctgtcactggttatcaccctttactgccggagggaccagaggctgccccccgatgcccacaagccccctgggggaggcagtttccggacccccatccaagaggagcaggccgacgcccactccaccctggccaagatcagagtgaagttcagcaggagcgcagacgcccccgcgtaccagcagggccagaaccagctctataacgagctcaatctaggacgaagagaggagtacgatgttttggacaagagacgtggccgggaccctgagatggggggaaagccgagaaggaagaaccctcaggaaggcctgtacaatgaactgcagaaagataagatggcggaggcctacagtgagattgggatgaaaggcgagcgccggaggggcaaggggcacgatggcctttaccagggtctcagtacagccaccaaggacacctacgacgcccttcacatgcaggccctgccccctcgcggctctggcgagggaaggggttccctgcttacttgcggcgacgtcgaagagaatcccggtccgatggccctcccagtaactgccctccttttgcccctcgcactccttcttcatgccgctcgccccaactgggtcaacgtgattagcgatttgaagaaaatcgaggaccttatacagtctatgcatattgacgctacactgtatactgagagtgatgtacacccgtcctgtaaggtaacggccatgaaatgctttcttctggagctccaggtcatcagcttggagtctggggacgcaagcatccacgatacggttgaaaacctcatcatccttgcgaacaactctctctcatctaatggaaacgttacagagagtgggtgtaaggagtgcgaagagttggaagaaaaaaacatcaaagaatttcttcaatccttcgttcacatagtgcaaatgttcattaacacgtccactaccacacccgccccgaggccacctacgccggcaccgactatcgccagtcaacccctctctctgcgccccgaggcttgccggcctgcggctggtggggcggtccacacccggggcctggattttgcgtgcgatatatacatctgggcacctcttgccggcacctgcggagtgctgcttctctcactcgttattacgctgtactgctaa

SEQ ID NO: 313 - DNA, 2166 bp, synthetic construct
  source 1..2166: mol_type = other DNA
atggccttaccagtgaccgccttgctcctgccgctggccttgctgctccacgccgccaggccggactacaaagacgatgacgataaaggcggtggtggctctggtggtggcggatcccaggtgcagctggtgcagtctggggctgaggtgaagaagcctggggcctcagtgaaggtttcctgcaaggcatctggatacaccttcaccagctactatatgcactgggtgcgacaggcccctggacaagggcttgagtggatgggatggatgaaccctgataacggtgatacagggtacgcacagatgttccagggcagagtcaccatgaccagggacacgtccacgagcacagtctacatggagctgagcagcctgagatctgaggacacggccgtgtattactgtgcttcaggggattactatgacatcttgtactggggccaagggaccctggtcaccgtctcctcaggtggaggcggttcaggcggaggtggctctggcggtggcggatcggacatccagatgacccagtctccatcctccctgtctgcatctgtaggagacagagtcaccatcacttgccaggcgagtcaggacattagcaactatttaaattggtatcagcagaaaccagggaaagcccctaagctcctgatctacgatgtgtccaatttggaaacaggggtcccatcaaggttcagtggaagtggatctgggacagattttactctcaccatcagcagcctgcagcctgaagattttgcaacatattactgtcaacaggctaattccttccctctcactttcggcggagggaccaaggtggagatcaaaaccacgacgccagcgccgcggccaccaacaccggcgcccaccatcgcgtcgcagcccctgtccctgcgcccagaggcgtgccggccagcggcggggggcgcagtgcacacgagggggctggacttcgcctgtgatatctacatctgggcgcccttggccgggacttgtggggtccttctcctgtcactggttatcaccctttactgccggagggaccagaggctgccccccgatgcccacaagccccctgggggaggcagtttccggacccccatccaagaggagcaggccgacgcccactccaccctggccaagatcagagtgaagttcagcaggagcgcagacgcccccgcgtaccagcagggccagaaccagctctataacgagctcaatctaggacgaagagaggagtacgatgttttggacaagagacgtggccgggaccctgagatggggggaaagccgagaaggaagaaccctcaggaaggcctgtacaatgaactgcagaaagataagatggcggaggcctacagtgagattgggatgaaaggcgagcgccggaggggcaaggggcacgatggcctttaccagggtctcagtacagccaccaaggacacctacgacgcccttcacatgcaggccctgccccctcgcggctctggcgagggaaggggttccctgcttacttgcggcgacgtcgaagagaatcccggtccgatggccctcccagtaactgccctccttttgcccctcgcactccttcttcatgccgctcgccccaactgggtcaacgtgattagcgatttgaagaaaatcgaggaccttatacagtctatgcatattgacgctacactgtatactgagagtgatgtacacccgtcctgtaaggtaacggccatgaaatgctttcttctggagctccaggtcatcagcttggagtctggggacgcaagcatccacgatacggttgaaaacctcatcatccttgcgaacaactctctctcatctaatggaaacgttacagagagtgggtgtaaggagtgcgaagagttggaagaaaaaaacatcaaagaatttcttcaatccttcgttcacatagtgcaaatgttcattaacacgtccactaccacacccgccccgaggccacctacgccggcaccgactatcgccagtcaacccctctctctgcgccccgaggcttgccggcctgcggctggtggggcggtccacacccggggcctggattttgcgtgcgatatatacatctgggcacctcttgccggcacctgcggagtgctgcttctctcactcgttattacgctgtactgctaa

SEQ ID NO: 314 - DNA, 2169 bp, synthetic construct
  source 1..2169: mol_type = other DNA
atggccttaccagtgaccgccttgctcctgccgctggccttgctgctccacgccgccaggccggactacaaagacgatgacgataaaggcggtggtggctctggtggtggcggatcccaggtgcagctggtgcagtctggggctgaggtgaagaagcctggggcctcagtgaaggtttcctgcaaggcatctggatacaccttcaccagctactatatgcactgggtgcgacaggcccctggacaagggcttgagtggatgggatggatgaaccccaacagtggtgatacaggatacgcacagaagttccagggcagagtcaccatgaccagggacacgtccacgagcacagtctacatggagctgagcagcctgagatctgaggacacggccgtgtattactgtgctagagggcccagcgggtacgaatttgactactggggccaagggaccctggtcaccgtctcctcaggtggaggcggttcaggcggaggtggctctggcggtggcggatcggacatccagatgacccagtctccatcctccctgtctgcatctgtaggagacagagtcaccatcacttgccgggcaagtcagaccattagcaattatttaaattggtatcagcagaaaccagggaaagcccctaagctcctgatctatgacgcatccagtttggaaagtggggtcccatcaaggttcagtggcagtggatctgggacagatttcactctcaccatcagcagtctgcaacctgaagattttgcaacttactactgtcaacaggcaatcagttttcctctcactttcggcggagggaccaaggtggagatcaaaaccacgacgccagcgccgcggccaccaacaccggcgcccaccatcgcgtcgcagcccctgtccctgcgcccagaggcgtgccggccagcggcggggggcgcagtgcacacgagggggctggacttcgcctgtgatatctacatctgggcgcccttggccgggacttgtggggtccttctcctgtcactggttatcaccctttactgccggagggaccagaggctgccccccgatgcccacaagccccctgggggaggcagtttccggacccccatccaagaggagcaggccgacgcccactccaccctggccaagatcagagtgaagttcagcaggagcgcagacgcccccgcgtaccagcagggccagaaccagctctataacgagctcaatctaggacgaagagaggagtacgatgttttggacaagagacgtggccgggaccctgagatggggggaaagccgagaaggaagaaccctcaggaaggcctgtacaatgaactgcagaaagataagatggcggaggcctacagtgagattgggatgaaaggcgagcgccggaggggcaaggggcacgatggcctttaccagggtctcagtacagccaccaaggacacctacgacgcccttcacatgcaggccctgccccctcgcggctctggcgagggaaggggttccctgcttacttgcggcgacgtcgaagagaatcccggtccgatggccctcccagtaactgccctccttttgcccctcgcactccttcttcatgccgctcgccccaactgggtcaacgtgattagcgatttgaagaaaatcgaggaccttatacagtctatgcatattgacgctacactgtatactgagagtgatgtacacccgtcctgtaaggtaacggccatgaaatgctttcttctggagctccaggtcatcagcttggagtctggggacgcaagcatccacgatacggttgaaaacctcatcatccttgcgaacaactctctctcatctaatggaaacgttacagagagtgggtgtaaggagtgcgaagagttggaagaaaaaaacatcaaagaatttcttcaatccttcgttcacatagtgcaaatgttcattaacacgtccactaccacacccgccccgaggccacctacgccggcaccgactatcgccagtcaacccctctctctgcgccccgaggcttgccggcctgcggctggtggggcggtccacacccggggcctggattttgcgtgcgatatatacatctgggcacctcttgccggcacctgcggagtgctgcttctctcactcgttattacgctgtactgctaa

SEQ ID NO: 315 - DNA, 2181 bp, synthetic construct
  source 1..2181: mol_type = other DNA
atggccttaccagtgaccgccttgctcctgccgctggccttgctgctccacgccgccaggccggactacaaagacgatgacgataaaggcggtggtggctctggtggtggcggatcccaggtgcagctggtgcagtctggggctgaggtgaagaagcctggggcctcagtgaaggtttcctgcaaggcatctggatacaccttcaccgattactatatgcactgggtgcgacaggcccctggacaagggcttgagtggatgggaataatcaaccctaatagtggtggaacaaattacgcacagaagttccagggcagagtcaccatgaccagggacacgtccacgagcacagtctacatggagctgagcagcctgagatctgaggacacggccgtgtattactgtgctagagattttagtgtgtatgctgctgcagatggcatggatgtctggggccaagggacattggtcaccgtctcttcaggtggaggcggttcaggcggaggtggctctggcggtggcggatcggacatccagatgacccagtctccatcctccctgtctgcatctgtaggagacagagtcaccatcacttgccgggcaagtcagagcattagcagctatttaaattggtatcagcagaaaccagggaaagcccctaagctcctgatctatgacgcatccaatttggccaccggggtcccatcaaggttcagtggcagtggatctgggacagatttcactctcaccatcagcagtctgcaacctgaagattttgcaacttactactgtcaacagagtgatagttcacctctcactttcggccaagggaccaaggtggagatcaaaaccacgacgccagcgccgcggccaccaacaccggcgcccaccatcgcgtcgcagcccctgtccctgcgcccagaggcgtgccggccagcggcggggggcgcagtgcacacgagggggctggacttcgcctgtgatatctacatctgggcgcccttggccgggacttgtggggtccttctcctgtcactggttatcaccctttactgccggagggaccagaggctgccccccgatgcccacaagccccctgggggaggcagtttccggacccccatccaagaggagcaggccgacgcccactccaccctggccaagatcagagtgaagttcagcaggagcgcagacgcccccgcgtaccagcagggccagaaccagctctataacgagctcaatctaggacgaagagaggagtacgatgttttggacaagagacgtggccgggaccctgagatggggggaaagccgagaaggaagaaccctcaggaaggcctgtacaatgaactgcagaaagataagatggcggaggcctacagtgagattgggatgaaaggcgagcgccggaggggcaaggggcacgatggcctttaccagggtctcagtacagccaccaaggacacctacgacgcccttcacatgcaggccctgccccctcgcggctctggcgagggaaggggttccctgcttacttgcggcgacgtcgaagagaatcccggtccgatggccctcccagtaactgccctccttttgcccctcgcactccttcttcatgccgctcgccccaactgggtcaacgtgattagcgatttgaagaaaatcgaggaccttatacagtctatgcatattgacgctacactgtatactgagagtgatgtacacccgtcctgtaaggtaacggccatgaaatgctttcttctggagctccaggtcatcagcttggagtctggggacgcaagcatccacgatacggttgaaaacctcatcatccttgcgaacaactctctctcatctaatggaaacgttacagagagtgggtgtaaggagtgcgaagagttggaagaaaaaaacatcaaagaatttcttcaatccttcgttcacatagtgcaaatgttcattaacacgtccactaccacacccgccccgaggccacctacgccggcaccgactatcgccagtcaacccctctctctgcgccccgaggcttgccggcctgcggctggtggggcggtccacacccggggcctggattttgcgtgcgatatatacatctgggcacctcttgccggcacctgcggagtgctgcttctctcactcgttattacgctgtactgctaa

SEQ ID NO: 316 - DNA, 2178 bp, synthetic construct
  source 1..2178: mol_type = other DNA
atggccttaccagtgaccgccttgctcctgccgctggccttgctgctccacgccgccaggccggactacaaagacgatgacgataaaggcggtggtggctctggtggtggcggatcccaggtgcagctggtgcagtctggggctgaggtgaagaagcctggggcctcagtgaaggtttcctgcaaggcatctggatacaccttcaccgggtactatatgcactgggtgcgacaggcccctggacaagggcttgagtggatgggaataatcaaccctggggatggcggtacaatctacgcacagaatttccagggcagagtcaccatgaccagggacacgtccacgagcacagtctacatggagctgagcagcctgagatctgaggacacggccgtgtattactgtgctagaggattcggcgagtcagcccccgatgcttttgatatctggggccaagggacaatggtcaccgtctcttcaggtggaggcggttcaggcggaggtggctctggcggtggcggatcggacatccagatgacccagtctccatcctccctgtctgcatctgtaggagacagagtcaccatcacttgccaggcaagtcaggacattagcaattatttaaattggtatcagcagaaaccagggaaagcccctaagctcctgatctatggtgcaacgacattgcaaagtggggtcccatcaaggttcagtggcagtggatctgggacagatttcactctcaccatcagcagtctgcaacctgaagattttgcaacttactactgtcaacaggcggatagttttccttacacttttggccaggggaccaagctggagatcaaaaccacgacgccagcgccgcggccaccaacaccggcgcccaccatcgcgtcgcagcccctgtccctgcgcccagaggcgtgccggccagcggcggggggcgcagtgcacacgagggggctggacttcgcctgtgatatctacatctgggcgcccttggccgggacttgtggggtccttctcctgtcactggttatcaccctttactgccggagggaccagaggctgccccccgatgcccacaagccccctgggggaggcagtttccggacccccatccaagaggagcaggccgacgcccactccaccctggccaagatcagagtgaagttcagcaggagcgcagacgcccccgcgtaccagcagggccagaaccagctctataacgagctcaatctaggacgaagagaggagtacgatgttttggacaagagacgtggccgggaccctgagatggggggaaagccgagaaggaagaaccctcaggaaggcctgtacaatgaactgcagaaagataagatggcggaggcctacagtgagattgggatgaaaggcgagcgccggaggggcaaggggcacgatggcctttaccagggtctcagtacagccaccaaggacacctacgacgcccttcacatgcaggccctgccccctcgcggctctggcgagggaaggggttccctgcttacttgcggcgacgtcgaagagaatcccggtccgatggccctcccagtaactgccctccttttgcccctcgcactccttcttcatgccgctcgccccaactgggtcaacgtgattagcgatttgaagaaaatcgaggaccttatacagtctatgcatattgacgctacactgtatactgagagtgatgtacacccgtcctgtaaggtaacggccatgaaatgctttcttctggagctccaggtcatcagcttggagtctggggacgcaagcatccacgatacggttgaaaacctcatcatccttgcgaacaactctctctcatctaatggaaacgttacagagagtgggtgtaaggagtgcgaagagttggaagaaaaaaacatcaaagaatttcttcaatccttcgttcacatagtgcaaatgttcattaacacgtccactaccacacccgccccgaggccacctacgccggcaccgactatcgccagtcaacccctctctctgcgccccgaggcttgccggcctgcggctggtggggcggtccacacccggggcctggattttgcgtgcgatatatacatctgggcacctcttgccggcacctgcggagtgctgcttctctcactcgttattacgctgtactgctaa

SEQ ID NO: 317 - DNA, 2169 bp, synthetic construct
  source 1..2169: mol_type = other DNA
atggccttaccagtgaccgccttgctcctgccgctggccttgctgctccacgccgccaggccggactacaaagacgatgacgataaaggcggtggtggctctggtggtggcggatcccaggtgcagctggtgcagtctggggctgaggtgaagaagcctggggcctcagtgaaggtttcctgcaaggcatctggatacaccttcaccggttactatatgcactgggtgcgacaggcccctggacaagggcttgagtggatgggaataatcaaccctagtggtgggagcacaagctacgcacagaagttccagggcagagtcaccatgaccagggacacgtccacgagcacagtctacatggagctgagcagcctgagatctgaggacacggccgtgtattactgtgctgccgggacagagatctactacatggacgtctggggcaaagggaccacggtcaccgtctcctcaggtggaggcggttcaggcggaggtggctctggcggtggcggatcggacatccagatgacccagtctccatcctccctgtctgcatctgtaggagacagagtcaccatcacttgcagggcgagtcagactattgacatctatttaaattggtatcagcagaaaccagggaaagcccctaagctcctgatctacgatgcatccaatttggaaacaggggtcccatcaaggttcagtggaagtggatctgggacagattttactttgaccatcagcagcctgcagcctgaagattttgcaacatattactgtcaacaggcagattccttccctctcactttcggcggagggaccaaggtggagatcaaaaccacgacgccagcgccgcggccaccaacaccggcgcccaccatcgcgtcgcagcccctgtccctgcgcccagaggcgtgccggccagcggcggggggcgcagtgcacacgagggggctggacttcgcctgtgatatctacatctgggcgcccttggccgggacttgtggggtccttctcctgtcactggttatcaccctttactgccggagggaccagaggctgccccccgatgcccacaagccccctgggggaggcagtttccggacccccatccaagaggagcaggccgacgcccactccaccctggccaagatcagagtgaagttcagcaggagcgcagacgcccccgcgtaccagcagggccagaaccagctctataacgagctcaatctaggacgaagagaggagtacgatgttttggacaagagacgtggccgggaccctgagatggggggaaagccgagaaggaagaaccctcaggaaggcctgtacaatgaactgcagaaagataagatggcggaggcctacagtgagattgggatgaaaggcgagcgccggaggggcaaggggcacgatggcctttaccagggtctcagtacagccaccaaggacacctacgacgcccttcacatgcaggccctgccccctcgcggctctggcgagggaaggggttccctgcttacttgcggcgacgtcgaagagaatcccggtccgatggccctcccagtaactgccctccttttgcccctcgcactccttcttcatgccgctcgccccaactgggtcaacgtgattagcgatttgaagaaaatcgaggaccttatacagtctatgcatattgacgctacactgtatactgagagtgatgtacacccgtcctgtaaggtaacggccatgaaatgctttcttctggagctccaggtcatcagcttggagtctggggacgcaagcatccacgatacggttgaaaacctcatcatccttgcgaacaactctctctcatctaatggaaacgttacagagagtgggtgtaaggagtgcgaagagttggaagaaaaaaacatcaaagaatttcttcaatccttcgttcacatagtgcaaatgttcattaacacgtccactaccacacccgccccgaggccacctacgccggcaccgactatcgccagtcaacccctctctctgcgccccgaggcttgccggcctgcggctggtggggcggtccacacccggggcctggattttgcgtgcgatatatacatctgggcacctcttgccggcacctgcggagtgctgcttctctcactcgttattacgctgtactgctaa

SEQ ID NO: 318 - DNA, 2196 bp, synthetic construct
  source 1..2196: mol_type = other DNA
atggccttaccagtgaccgccttgctcctgccgctggccttgctgctccacgccgccaggccggactacaaagacgatgacgataaaggcggtggtggctctggtggtggcggatcccaagtgcagttagttcagtcaggcgccgaagttaaaaaacccggagcgagcgtaaaagtgtcttgtaaagccagtggcggcacatttagctcttatgcgatatcatgggttcgccaagcaccaggccagggcctggaatggatggggatgataaatccaagtgatggcgccactacttacgcacagaagttccagggcagagtcaccatgaccagggacacgtccacgagcacagtctacatggagctgagcagcctgagatctgaggacacggccgtgtattactgtgctagagagagggagctactacatttcgccacaaattattactactatggtatggacgtgtggggccaagggaccaccgtcaccgtctcctcaggtggaggcggttcaggcggaggtggctctggcggtggcggatcggacatccagatgacccagtctccatcttctctgtctgcatctgtaggagacagagtcaccatcacttgtcgggcgagtcagggtattagcaacaacttaaattggtatcagcagaaaccagggaaagcccctaagctcctgatctatgctgcatccagtttgcacagtggggtcccatcaaggttcagcggcagtggatctgggacagatttcactctcactatcagcagcctgcagcctgaagattttgcaacttactattgtcaacaggctgatgctttccctctcactttcggcggagggaccaaggtggagatcaaaaccacgacgccagcgccgcggccaccaacaccggcgcccaccatcgcgtcgcagcccctgtccctgcgcccagaggcgtgccggccagcggcggggggcgcagtgcacacgagggggctggacttcgcctgtgatatctacatctgggcgcccttggccgggacttgtggggtccttctcctgtcactggttatcaccctttactgccggagggaccagaggctgccccccgatgcccacaagccccctgggggaggcagtttccggacccccatccaagaggagcaggccgacgcccactccaccctggccaagatcagagtgaagttcagcaggagcgcagacgcccccgcgtaccagcagggccagaaccagctctataacgagctcaatctaggacgaagagaggagtacgatgttttggacaagagacgtggccgggaccctgagatggggggaaagccgagaaggaagaaccctcaggaaggcctgtacaatgaactgcagaaagataagatggcggaggcctacagtgagattgggatgaaaggcgagcgccggaggggcaaggggcacgatggcctttaccagggtctcagtacagccaccaaggacacctacgacgcccttcacatgcaggccctgccccctcgcggctctggcgagggaaggggttccctgcttacttgcggcgacgtcgaagagaatcccggtccgatggccctcccagtaactgccctccttttgcccctcgcactccttcttcatgccgctcgccccaactgggtcaacgtgattagcgatttgaagaaaatcgaggaccttatacagtctatgcatattgacgctacactgtatactgagagtgatgtacacccgtcctgtaaggtaacggccatgaaatgctttcttctggagctccaggtcatcagcttggagtctggggacgcaagcatccacgatacggttgaaaacctcatcatccttgcgaacaactctctctcatctaatggaaacgttacagagagtgggtgtaaggagtgcgaagagttggaagaaaaaaacatcaaagaatttcttcaatccttcgttcacatagtgcaaatgttcattaacacgtccactaccacacccgccccgaggccacctacgccggcaccgactatcgccagtcaacccctctctctgcgccccgaggcttgccggcctgcggctggtggggcggtccacacccggggcctggattttgcgtgcgatatatacatctgggcacctcttgccggcacctgcggagtgctgcttctctcactcgttattacgctgtactgctaa

SEQ ID NO: 319 - DNA, 2184 bp, synthetic construct
  source 1..2184: mol_type = other DNA
atggccttaccagtgaccgccttgctcctgccgctggccttgctgctccacgccgccaggccggactacaaagacgatgacgataaaggcggtggtggctctggtggtggcggatcccaggtgcagctggtgcagtctggggctgaggtgaagaagcctggggcctcagtgaaggtttcctgcaaggcatctggatacaccttcacccggaactatatgcactgggtgcgacaggcccctggacaagggcttgagtggatgggatggatctctcctgacaatggtgttacaaattacgcacagaatttccagggcagagtcaccatgaccagggacacgtccacgagcacagtctacatggagctgagcagcctgagatctgaggacacggccgtgtattactgtgctaagacacaaggctcatccagctggtatcagtggtacttcgatctctggggccgtggcaccctggtcactgtctcctcaggtggaggcggttcaggcggaggtggctctggcggtggcggatcggacatccagatgacccagtctccatcctccctgtctgcatctgtaggagacagagtcaccatcacttgccgggcaagtcagagcattggaacctggttagcctggtatcagcagaaaccagggaaagcccctaagctcctgatctatgctgcatccagtttgcaaagtggggtcccatcaaggttcagtggcagtggatctgggacagatttcactctcaccatcagcagtctgcaacctgaagattttgcaacttactactgtcaacagagttacaccacccctattacgttcggccaagggaccaaggtggaaatcaaaaccacgacgccagcgccgcggccaccaacaccggcgcccaccatcgcgtcgcagcccctgtccctgcgcccagaggcgtgccggccagcggcggggggcgcagtgcacacgagggggctggacttcgcctgtgatatctacatctgggcgcccttggccgggacttgtggggtccttctcctgtcactggttatcaccctttactgccggagggaccagaggctgccccccgatgcccacaagccccctgggggaggcagtttccggacccccatccaagaggagcaggccgacgcccactccaccctggccaagatcagagtgaagttcagcaggagcgcagacgcccccgcgtaccagcagggccagaaccagctctataacgagctcaatctaggacgaagagaggagtacgatgttttggacaagagacgtggccgggaccctgagatggggggaaagccgagaaggaagaaccctcaggaaggcctgtacaatgaactgcagaaagataagatggcggaggcctacagtgagattgggatgaaaggcgagcgccggaggggcaaggggcacgatggcctttaccagggtctcagtacagccaccaaggacacctacgacgcccttcacatgcaggccctgccccctcgcggctctggcgagggaaggggttccctgcttacttgcggcgacgtcgaagagaatcccggtccgatggccctcccagtaactgccctccttttgcccctcgcactccttcttcatgccgctcgccccaactgggtcaacgtgattagcgatttgaagaaaatcgaggaccttatacagtctatgcatattgacgctacactgtatactgagagtgatgtacacccgtcctgtaaggtaacggccatgaaatgctttcttctggagctccaggtcatcagcttggagtctggggacgcaagcatccacgatacggttgaaaacctcatcatccttgcgaacaactctctctcatctaatggaaacgttacagagagtgggtgtaaggagtgcgaagagttggaagaaaaaaacatcaaagaatttcttcaatccttcgttcacatagtgcaaatgttcattaacacgtccactaccacacccgccccgaggccacctacgccggcaccgactatcgccagtcaacccctctctctgcgccccgaggcttgccggcctgcggctggtggggcggtccacacccggggcctggattttgcgtgcgatatatacatctgggcacctcttgccggcacctgcggagtgctgcttctctcactcgttattacgctgtactgctaa

SEQ ID NO: 320 - DNA, 2172 bp, synthetic construct
  source 1..2172: mol_type = other DNA
atggccttaccagtgaccgccttgctcctgccgctggccttgctgctccacgccgccaggccggactacaaagacgatgacgataaaggcggtggtggctctggtggtggcggatcccaggtgcagctggtgcagtctggggctgaggtgaagaagcctggggcctcagtgaaggtttcctgcaaggcatctggatacaccttcaccagctactatatgcactgggtgcgacaggcccctggacaagggcttgagtggatgggaataatcgatccagggagtggtgacacaagctacgcacagaagttccagggcagagtcaccatgaccagggacacgtccacgagcacagtctacatggagctgagcagcctgagatctgaggacacggccgtgtattactgtgctagagggtccaactggtacgactactttgactactggggccaagggaccctggtcaccgtctcctcaggtggaggcggttcaggcggaggtggctctggcggtggcggatcggaaatagtgatgacgcagtctccagccaccctgtctgtgtctccaggggaaagagccaccctctcctgcagggccagtcagagtgttagcagctacttagcctggtaccagcagaaacctggccaggctcccaggctcctcatctatggtgcatccaccagggccactggtatcccagccaggttcagtggcagtgggtctgggacagagttcactctcaccatcagcagcctgcagtctgaagattttgcagtttattactgtcagcagtatgatagctatcctccaactttcggcggagggaccaaggtggagatcaaaaccacgacgccagcgccgcggccaccaacaccggcgcccaccatcgcgtcgcagcccctgtccctgcgcccagaggcgtgccggccagcggcggggggcgcagtgcacacgagggggctggacttcgcctgtgatatctacatctgggcgcccttggccgggacttgtggggtccttctcctgtcactggttatcaccctttactgccggagggaccagaggctgccccccgatgcccacaagccccctgggggaggcagtttccggacccccatccaagaggagcaggccgacgcccactccaccctggccaagatcagagtgaagttcagcaggagcgcagacgcccccgcgtaccagcagggccagaaccagctctataacgagctcaatctaggacgaagagaggagtacgatgttttggacaagagacgtggccgggaccctgagatggggggaaagccgagaaggaagaaccctcaggaaggcctgtacaatgaactgcagaaagataagatggcggaggcctacagtgagattgggatgaaaggcgagcgccggaggggcaaggggcacgatggcctttaccagggtctcagtacagccaccaaggacacctacgacgcccttcacatgcaggccctgccccctcgcggctctggcgagggaaggggttccctgcttacttgcggcgacgtcgaagagaatcccggtccgatggccctcccagtaactgccctccttttgcccctcgcactccttcttcatgccgctcgccccaactgggtcaacgtgattagcgatttgaagaaaatcgaggaccttatacagtctatgcatattgacgctacactgtatactgagagtgatgtacacccgtcctgtaaggtaacggccatgaaatgctttcttctggagctccaggtcatcagcttggagtctggggacgcaagcatccacgatacggttgaaaacctcatcatccttgcgaacaactctctctcatctaatggaaacgttacagagagtgggtgtaaggagtgcgaagagttggaagaaaaaaacatcaaagaatttcttcaatccttcgttcacatagtgcaaatgttcattaacacgtccactaccacacccgccccgaggccacctacgccggcaccgactatcgccagtcaacccctctctctgcgccccgaggcttgccggcctgcggctggtggggcggtccacacccggggcctggattttgcgtgcgatatatacatctgggcacctcttgccggcacctgcggagtgctgcttctctcactcgttattacgctgtactgctaa

SEQ ID NO: 321 - DNA, 2172 bp, synthetic construct
  source 1..2172: mol_type = other DNA
atggccttaccagtgaccgccttgctcctgccgctggccttgctgctccacgccgccaggccggactacaaagacgatgacgataaaggcggtggtggctctggtggtggcggatcccaggtgcagctggtgcagtctggggctgaggtgaagaagcctggggcctcagtgaaggtttcctgcaaggcatctggataccgcctgagcgaccattatatgcactgggtgcgacaggcccctggacaagggcttgagtggatgggaataatcaaccctagtggtgggagcacaacatacgcacagaacttccagggcagagtcaccatgaccagggacacgtccacgagcacagtctacatggagctgagcagcctgagatctgaggacacggccgtgtattactgtgcttccagttactatggtgactacgtcttggtgaattggggccaagggaccctggtcaccgtctcctcaggtggaggcggttcaggcggaggtggctctggcggtggcggatcggacatccagatgacccagtctccatcctccctgtctgcatctgtaggagacagagtcaccatcacttgccaggcaagtcaggacattagcaattatttaaattggtatcagcagaaaccagggaaagcccctaagctcctgatctatgctgcatccaccttggaaagtggggtcccatcaaggttcagtggcagtggatctgggacagatttcactctcaccatcagcagtctgcaacctgaagattttgcaacttactactgtcttcaggattacgactaccctctgacttttggccaggggaccaagctggagatcaaaaccacgacgccagcgccgcggccaccaacaccggcgcccaccatcgcgtcgcagcccctgtccctgcgcccagaggcgtgccggccagcggcggggggcgcagtgcacacgagggggctggacttcgcctgtgatatctacatctgggcgcccttggccgggacttgtggggtccttctcctgtcactggttatcaccctttactgccggagggaccagaggctgccccccgatgcccacaagccccctgggggaggcagtttccggacccccatccaagaggagcaggccgacgcccactccaccctggccaagatcagagtgaagttcagcaggagcgcagacgcccccgcgtaccagcagggccagaaccagctctataacgagctcaatctaggacgaagagaggagtacgatgttttggacaagagacgtggccgggaccctgagatggggggaaagccgagaaggaagaaccctcaggaaggcctgtacaatgaactgcagaaagataagatggcggaggcctacagtgagattgggatgaaaggcgagcgccggaggggcaaggggcacgatggcctttaccagggtctcagtacagccaccaaggacacctacgacgcccttcacatgcaggccctgccccctcgcggctctggcgagggaaggggttccctgcttacttgcggcgacgtcgaagagaatcccggtccgatggccctcccagtaactgccctccttttgcccctcgcactccttcttcatgccgctcgccccaactgggtcaacgtgattagcgatttgaagaaaatcgaggaccttatacagtctatgcatattgacgctacactgtatactgagagtgatgtacacccgtcctgtaaggtaacggccatgaaatgctttcttctggagctccaggtcatcagcttggagtctggggacgcaagcatccacgatacggttgaaaacctcatcatccttgcgaacaactctctctcatctaatggaaacgttacagagagtgggtgtaaggagtgcgaagagttggaagaaaaaaacatcaaagaatttcttcaatccttcgttcacatagtgcaaatgttcattaacacgtccactaccacacccgccccgaggccacctacgccggcaccgactatcgccagtcaacccctctctctgcgccccgaggcttgccggcctgcggctggtggggcggtccacacccggggcctggattttgcgtgcgatatatacatctgggcacctcttgccggcacctgcggagtgctgcttctctcactcgttattacgctgtactgctaa

SEQ ID NO: 322 - DNA, 2175 bp, synthetic construct
  source 1..2175: mol_type = other DNA
atggccttaccagtgaccgccttgctcctgccgctggccttgctgctccacgccgccaggccggactacaaagacgatgacgataaaggcggtggtggctctggtggtggcggatcccaggtgcagctggtgcagtctggggctgaggtgaagaagcctggggcctcagtgaaggtttcctgcaaggcatctggatacaccttcaccgattactatgtccactgggtgcgacaggcccctggacaagggcttgagtggatgggatggatcaacccgaatactggtgggacaagcttcgcacagaatttccagggcagagtcaccatgaccagggacacgtccacgagcacagtctacatggagctgagcagcctgagatctgaggacacggccgtgtattactgtgctagagatctgggtcaatggttgggagagattgactactggggccaagggaccctggtcaccgtctcctcaggtggaggcggttcaggcggaggtggctctggcggtggcggatcggacatccagatgacccagtctccatcttctctctctgcatctgtaggagacagagtcaccatcacttgtcgggcgagtcagacaatttataagtggttagcctggtatcagcagaaaccagggaaagcccctaagctcctgatctatgacgcatccagtttggaaagtggggtcccatcaaggttcagcggcagtggatctgggacagatttcactctcactatcagcagcctgcagcctgaagattttgcaacttactattgtcaacaggctaacagtttccctttcactttcggccctgggaccaaagtggatatcaaaaccacgacgccagcgccgcggccaccaacaccggcgcccaccatcgcgtcgcagcccctgtccctgcgcccagaggcgtgccggccagcggcggggggcgcagtgcacacgagggggctggacttcgcctgtgatatctacatctgggcgcccttggccgggacttgtggggtccttctcctgtcactggttatcaccctttactgccggagggaccagaggctgccccccgatgcccacaagccccctgggggaggcagtttccggacccccatccaagaggagcaggccgacgcccactccaccctggccaagatcagagtgaagttcagcaggagcgcagacgcccccgcgtaccagcagggccagaaccagctctataacgagctcaatctaggacgaagagaggagtacgatgttttggacaagagacgtggccgggaccctgagatggggggaaagccgagaaggaagaaccctcaggaaggcctgtacaatgaactgcagaaagataagatggcggaggcctacagtgagattgggatgaaaggcgagcgccggaggggcaaggggcacgatggcctttaccagggtctcagtacagccaccaaggacacctacgacgcccttcacatgcaggccctgccccctcgcggctctggcgagggaaggggttccctgcttacttgcggcgacgtcgaagagaatcccggtccgatggccctcccagtaactgccctccttttgcccctcgcactccttcttcatgccgctcgccccaactgggtcaacgtgattagcgatttgaagaaaatcgaggaccttatacagtctatgcatattgacgctacactgtatactgagagtgatgtacacccgtcctgtaaggtaacggccatgaaatgctttcttctggagctccaggtcatcagcttggagtctggggacgcaagcatccacgatacggttgaaaacctcatcatccttgcgaacaactctctctcatctaatggaaacgttacagagagtgggtgtaaggagtgcgaagagttggaagaaaaaaacatcaaagaatttcttcaatccttcgttcacatagtgcaaatgttcattaacacgtccactaccacacccgccccgaggccacctacgccggcaccgactatcgccagtcaacccctctctctgcgccccgaggcttgccggcctgcggctggtggggcggtccacacccggggcctggattttgcgtgcgatatatacatctgggcacctcttgccggcacctgcggagtgctgcttctctcactcgttattacgctgtactgctaa

SEQ ID NO: 323 - DNA, 2187 bp, synthetic construct
  source 1..2187: mol_type = other DNA
atggccttaccagtgaccgccttgctcctgccgctggccttgctgctccacgccgccaggccggactacaaagacgatgacgataaaggcggtggtggctctggtggtggcggatcccaggtgcagctggtgcagtctggggctgaggtgaagaagcctggggcctcagtgaaggtttcctgcaaggcatctggatacaccttcaccgactacaccgattactttgtgcactgggtgcgacaggcccctggacaagggcttgagtggatgggaatattcaaccctagtgatggtagcacaagctacgcacaggaattccagggcagagtcaccatgaccagggacacgtccacgagcacagtctacatggagctgagcagcctgagatctgaggacacggccgtgtattactgtgctagaggaccttacagtagtagctggtattactttgactactggggccaagggaccctggtcaccgtctcctcaggtggaggcggttcaggcggaggtggctctggcggtggcggatcggacatccagatgacccagtctccatcctccctgtctgcatctgtaggagacagagtcaccatcacttgccaggcgagtcaggacattagcaactatttaaattggtatcagcagaaaccagggaaagcccctaagctcctgatctacgatgcatccaatttggaaacaggggtcccatcaaggttcagtggaagtggatctgggacagattttactctgaccatcagcagcctgcagcctgaagatttcgcaacatattactgtcaacaggcccactcgtttcctcccacgttcggccaagggaccaaggtggaaatcaaaaccacgacgccagcgccgcggccaccaacaccggcgcccaccatcgcgtcgcagcccctgtccctgcgcccagaggcgtgccggccagcggcggggggcgcagtgcacacgagggggctggacttcgcctgtgatatctacatctgggcgcccttggccgggacttgtggggtccttctcctgtcactggttatcaccctttactgccggagggaccagaggctgccccccgatgcccacaagccccctgggggaggcagtttccggacccccatccaagaggagcaggccgacgcccactccaccctggccaagatcagagtgaagttcagcaggagcgcagacgcccccgcgtaccagcagggccagaaccagctctataacgagctcaatctaggacgaagagaggagtacgatgttttggacaagagacgtggccgggaccctgagatggggggaaagccgagaaggaagaaccctcaggaaggcctgtacaatgaactgcagaaagataagatggcggaggcctacagtgagattgggatgaaaggcgagcgccggaggggcaaggggcacgatggcctttaccagggtctcagtacagccaccaaggacacctacgacgcccttcacatgcaggccctgccccctcgcggctctggcgagggaaggggttccctgcttacttgcggcgacgtcgaagagaatcccggtccgatggccctcccagtaactgccctccttttgcccctcgcactccttcttcatgccgctcgccccaactgggtcaacgtgattagcgatttgaagaaaatcgaggaccttatacagtctatgcatattgacgctacactgtatactgagagtgatgtacacccgtcctgtaaggtaacggccatgaaatgctttcttctggagctccaggtcatcagcttggagtctggggacgcaagcatccacgatacggttgaaaacctcatcatccttgcgaacaactctctctcatctaatggaaacgttacagagagtgggtgtaaggagtgcgaagagttggaagaaaaaaacatcaaagaatttcttcaatccttcgttcacatagtgcaaatgttcattaacacgtccactaccacacccgccccgaggccacctacgccggcaccgactatcgccagtcaacccctctctctgcgccccgaggcttgccggcctgcggctggtggggcggtccacacccggggcctggattttgcgtgcgatatatacatctgggcacctcttgccggcacctgcggagtgctgcttctctcactcgttattacgctgtactgctaa

SEQ ID NO: 324 - DNA, 2175 bp, synthetic construct
  source 1..2175: mol_type = other DNA
atggccttaccagtgaccgccttgctcctgccgctggccttgctgctccacgccgccaggccggactacaaagacgatgacgataaaggcggtggtggctctggtggtggcggatcccaggtgcagctggtgcagtctggggctgaggtgaagaagcctggggcctcagtgaaggtttcctgcaaggcatctggatacatcttcaccgattactatatgcactgggtgcgacaggcccctggacaagggcttgagtggatgggaataatcaaccctagtggtggagatacactttacgcacagaagttccagggcagagtcaccatgaccagggacacgtccacgagcacagtctacatggagctgagcagcctgagatctgaggacacggccgtgtattactgtgctagagaaggcgtaggagctatgggcgtgtttgactactggggccaagggaccctggtcaccgtctcctcaggtggaggcggttcaggcggaggtggctctggcggtggcggatcggacatccagatgacccagtctccatcctccctgtctgcatctgtaggagacagagtcaccatcacttgccgggcaagtaccagcattagcgattatgtgcattggtatcagcagaaaccagggaaagcccctaagctcctgatctatgatgcatccagtttgcaaagtggggtcccatcaaggttcagtggcagtggatctgggacagatttcactctcaccatcagcagtctgcaacctgaagattttgcaacttactactgtcaacagagtgatagtacccctcccactttcggcggagggaccaaggtggagatcaaaaccacgacgccagcgccgcggccaccaacaccggcgcccaccatcgcgtcgcagcccctgtccctgcgcccagaggcgtgccggccagcggcggggggcgcagtgcacacgagggggctggacttcgcctgtgatatctacatctgggcgcccttggccgggacttgtggggtccttctcctgtcactggttatcaccctttactgccggagggaccagaggctgccccccgatgcccacaagccccctgggggaggcagtttccggacccccatccaagaggagcaggccgacgcccactccaccctggccaagatcagagtgaagttcagcaggagcgcagacgcccccgcgtaccagcagggccagaaccagctctataacgagctcaatctaggacgaagagaggagtacgatgttttggacaagagacgtggccgggaccctgagatggggggaaagccgagaaggaagaaccctcaggaaggcctgtacaatgaactgcagaaagataagatggcggaggcctacagtgagattgggatgaaaggcgagcgccggaggggcaaggggcacgatggcctttaccagggtctcagtacagccaccaaggacacctacgacgcccttcacatgcaggccctgccccctcgcggctctggcgagggaaggggttccctgcttacttgcggcgacgtcgaagagaatcccggtccgatggccctcccagtaactgccctccttttgcccctcgcactccttcttcatgccgctcgccccaactgggtcaacgtgattagcgatttgaagaaaatcgaggaccttatacagtctatgcatattgacgctacactgtatactgagagtgatgtacacccgtcctgtaaggtaacggccatgaaatgctttcttctggagctccaggtcatcagcttggagtctggggacgcaagcatccacgatacggttgaaaacctcatcatccttgcgaacaactctctctcatctaatggaaacgttacagagagtgggtgtaaggagtgcgaagagttggaagaaaaaaacatcaaagaatttcttcaatccttcgttcacatagtgcaaatgttcattaacacgtccactaccacacccgccccgaggccacctacgccggcaccgactatcgccagtcaacccctctctctgcgccccgaggcttgccggcctgcggctggtggggcggtccacacccggggcctggattttgcgtgcgatatatacatctgggcacctcttgccggcacctgcggagtgctgcttctctcactcgttattacgctgtactgctaa

SEQ ID NO: 325 - DNA, 2181 bp, synthetic construct
  source 1..2181: mol_type = other DNA
atggccttaccagtgaccgccttgctcctgccgctggccttgctgctccacgccgccaggccggactacaaagacgatgacgataaaggcggtggtggctctggtggtggcggatcccaggtgcagctggtgcagtctggggctgaggtgaagaagcctggggcctcagtgaaggtttcctgcaaggcatctggatacaccttcaccgatcactatatccactgggtgcgacaggcccctggacaagggcttgagtggatgggatggatcagtgcgtacaatggtaaaacaaattacgcacagaagttccagggcagagtcaccatgaccagggacacgtccacgagcacagtctacatggagctgagcagcctgagatctgaggacacggccgtgtattactgtgctagagacacaatctactatgacttttggagtgggtacgactactggggccaagggaccctggtcaccgtctcctcaggtggaggcggttcaggcggaggtggctctggcggtggcggatcggacatccagatgacccagtctccatcctccctgtctgcatctgtaggagacagagtcaccatcacttgccgggcaagtcagggaattagcaataatttaaattggtatcagcagaaaccagggaaagcccctaagctcctgatctattacgcatccaccttgcaaagtggggtcccatcaaggttcagtggcagtggatctgggacagatttcactctcaccatcagcagtctgcaacctgaagattttgcaacttactactgtcaacagagttacagtacccctatcaccttcggccaagggacacgactggagattaaaaccacgacgccagcgccgcggccaccaacaccggcgcccaccatcgcgtcgcagcccctgtccctgcgcccagaggcgtgccggccagcggcggggggcgcagtgcacacgagggggctggacttcgcctgtgatatctacatctgggcgcccttggccgggacttgtggggtccttctcctgtcactggttatcaccctttactgccggagggaccagaggctgccccccgatgcccacaagccccctgggggaggcagtttccggacccccatccaagaggagcaggccgacgcccactccaccctggccaagatcagagtgaagttcagcaggagcgcagacgcccccgcgtaccagcagggccagaaccagctctataacgagctcaatctaggacgaagagaggagtacgatgttttggacaagagacgtggccgggaccctgagatggggggaaagccgagaaggaagaaccctcaggaaggcctgtacaatgaactgcagaaagataagatggcggaggcctacagtgagattgggatgaaaggcgagcgccggaggggcaaggggcacgatggcctttaccagggtctcagtacagccaccaaggacacctacgacgcccttcacatgcaggccctgccccctcgcggctctggcgagggaaggggttccctgcttacttgcggcgacgtcgaagagaatcccggtccgatggccctcccagtaactgccctccttttgcccctcgcactccttcttcatgccgctcgccccaactgggtcaacgtgattagcgatttgaagaaaatcgaggaccttatacagtctatgcatattgacgctacactgtatactgagagtgatgtacacccgtcctgtaaggtaacggccatgaaatgctttcttctggagctccaggtcatcagcttggagtctggggacgcaagcatccacgatacggttgaaaacctcatcatccttgcgaacaactctctctcatctaatggaaacgttacagagagtgggtgtaaggagtgcgaagagttggaagaaaaaaacatcaaagaatttcttcaatccttcgttcacatagtgcaaatgttcattaacacgtccactaccacacccgccccgaggccacctacgccggcaccgactatcgccagtcaacccctctctctgcgccccgaggcttgccggcctgcggctggtggggcggtccacacccggggcctggattttgcgtgcgatatatacatctgggcacctcttgccggcacctgcggagtgctgcttctctcactcgttattacgctgtactgctaa

SEQ ID NO: 326 - DNA, 2181 bp, synthetic construct
  source 1..2181: mol_type = other DNA
atggccttaccagtgaccgccttgctcctgccgctggccttgctgctccacgccgccaggccggactacaaagacgatgacgataaaggcggtggtggctctggtggtggcggatcccaggtgcagctggtgcagtctggggctgaggtgaagaagcctggggcctcagtgaaggtttcctgcaaggcatctggatacaccttcaccagctactatatgcactgggtgcgacaggcccctggacaagggcttgagtggatgggaataatcaaccctagtggtggcgcgacaatctacgcacagaagttccagggcagagtcaccatgaccagggacacgtccacgagcacagtctacatggagctgagcagcctgagatctgaggacacggccgtgtattactgtgctagatctcgcggtgactactatggaagcggggattttgactactggggccaagggaccctggtcaccgtctcctcaggtggaggcggttcaggcggaggtggctctggcggtggcggatcggacatccagatgacccagtctccatcctccctgtctgcatctgtaggagacagagtcaccatcacttgccgggcaagtcagacgattagcaattatttaaattggtatcagcagaaaccagggaaagcccctaagctcctgatctatgatgcatccacgttggaagccggggtcccatcaaggttcagtggcagtggatctgggacagatttcactctcaccatcagcagtctgcaacctgaagattttgcaacttactactgtcaacagagttacaaccctccatacacttttggccaggggaccaagctggagatcaaaaccacgacgccagcgccgcggccaccaacaccggcgcccaccatcgcgtcgcagcccctgtccctgcgcccagaggcgtgccggccagcggcggggggcgcagtgcacacgagggggctggacttcgcctgtgatatctacatctgggcgcccttggccgggacttgtggggtccttctcctgtcactggttatcaccctttactgccggagggaccagaggctgccccccgatgcccacaagccccctgggggaggcagtttccggacccccatccaagaggagcaggccgacgcccactccaccctggccaagatcagagtgaagttcagcaggagcgcagacgcccccgcgtaccagcagggccagaaccagctctataacgagctcaatctaggacgaagagaggagtacgatgttttggacaagagacgtggccgggaccctgagatggggggaaagccgagaaggaagaaccctcaggaaggcctgtacaatgaactgcagaaagataagatggcggaggcctacagtgagattgggatgaaaggcgagcgccggaggggcaaggggcacgatggcctttaccagggtctcagtacagccaccaaggacacctacgacgcccttcacatgcaggccctgccccctcgcggctctggcgagggaaggggttccctgcttacttgcggcgacgtcgaagagaatcccggtccgatggccctcccagtaactgccctccttttgcccctcgcactccttcttcatgccgctcgccccaactgggtcaacgtgattagcgatttgaagaaaatcgaggaccttatacagtctatgcatattgacgctacactgtatactgagagtgatgtacacccgtcctgtaaggtaacggccatgaaatgctttcttctggagctccaggtcatcagcttggagtctggggacgcaagcatccacgatacggttgaaaacctcatcatccttgcgaacaactctctctcatctaatggaaacgttacagagagtgggtgtaaggagtgcgaagagttggaagaaaaaaacatcaaagaatttcttcaatccttcgttcacatagtgcaaatgttcattaacacgtccactaccacacccgccccgaggccacctacgccggcaccgactatcgccagtcaacccctctctctgcgccccgaggcttgccggcctgcggctggtggggcggtccacacccggggcctggattttgcgtgcgatatatacatctgggcacctcttgccggcacctgcggagtgctgcttctctcactcgttattacgctgtactgctaa

SEQ ID NO: 327 - DNA, 2169 bp, synthetic construct
  source 1..2169: mol_type = other DNA
atggccttaccagtgaccgccttgctcctgccgctggccttgctgctccacgccgccaggccggactacaaagacgatgacgataaaggcggtggtggctctggtggtggcggatcccaggtgcagctggtgcagtctggggctgaggtgaagaagcctggggcctcagtgaaggtttcctgcaaggcatctggatacaccttcaccgattactatatgcactgggtgcgacaggcccctggacaagggcttgagtggatgggaataatcaaccctagtggtggaagcacaagctacgcacagaagttccagggcagagtcaccatgaccagggacacgtccacgagcacagtctacatggagctgagcagcctgagatctgaggacacggccgtgtattactgtgctagaggatattttgatcacgcattcgatatctggggccaagggacaatggtcaccgtctcttcaggtggaggcggttcaggcggaggtggctctggcggtggcggatcggacatccagatgacccagtctccatcctccctgtctgcatctgtaggagacagagtcaccatcacttgccgggcaagtcagagcattagcacttatttaaattggtatcagcagaaaccagggaaagcccctaagctcctgatctatgatgcatccaacttggagatcggggtcccatcaaggttcagtggcagtggatctgggacagatttcactctcaccatcagcagtctgcaacctgaagattttgcaacttactactgtcaacagagtgacagttcaccactcactttcggccaggggaccaaggtggagatcaaaaccacgacgccagcgccgcggccaccaacaccggcgcccaccatcgcgtcgcagcccctgtccctgcgcccagaggcgtgccggccagcggcggggggcgcagtgcacacgagggggctggacttcgcctgtgatatctacatctgggcgcccttggccgggacttgtggggtccttctcctgtcactggttatcaccctttactgccggagggaccagaggctgccccccgatgcccacaagccccctgggggaggcagtttccggacccccatccaagaggagcaggccgacgcccactccaccctggccaagatcagagtgaagttcagcaggagcgcagacgcccccgcgtaccagcagggccagaaccagctctataacgagctcaatctaggacgaagagaggagtacgatgttttggacaagagacgtggccgggaccctgagatggggggaaagccgagaaggaagaaccctcaggaaggcctgtacaatgaactgcagaaagataagatggcggaggcctacagtgagattgggatgaaaggcgagcgccggaggggcaaggggcacgatggcctttaccagggtctcagtacagccaccaaggacacctacgacgcccttcacatgcaggccctgccccctcgcggctctggcgagggaaggggttccctgcttacttgcggcgacgtcgaagagaatcccggtccgatggccctcccagtaactgccctccttttgcccctcgcactccttcttcatgccgctcgccccaactgggtcaacgtgattagcgatttgaagaaaatcgaggaccttatacagtctatgcatattgacgctacactgtatactgagagtgatgtacacccgtcctgtaaggtaacggccatgaaatgctttcttctggagctccaggtcatcagcttggagtctggggacgcaagcatccacgatacggttgaaaacctcatcatccttgcgaacaactctctctcatctaatggaaacgttacagagagtgggtgtaaggagtgcgaagagttggaagaaaaaaacatcaaagaatttcttcaatccttcgttcacatagtgcaaatgttcattaacacgtccactaccacacccgccccgaggccacctacgccggcaccgactatcgccagtcaacccctctctctgcgccccgaggcttgccggcctgcggctggtggggcggtccacacccggggcctggattttgcgtgcgatatatacatctgggcacctcttgccggcacctgcggagtgctgcttctctcactcgttattacgctgtactgctaa

SEQ ID NO: 328 - DNA, 2187 bp, synthetic construct
  source 1..2187: mol_type = other DNA
atggccttaccagtgaccgccttgctcctgccgctggccttgctgctccacgccgccaggccggactacaaagacgatgacgataaaggcggtggtggctctggtggtggcggatcccaggtgcagctggtgcagtctggggctgaggtgaagaagcctggggcctcagtgaaggtttcctgcaaggcatctggatacaccttcaccggttactatatgcactgggtgcgacaggcccctggacaagggcttgagtggatgggaataatcaaccctagtggtggggatacaatatacgcacagaagttccagggcagagtcaccatgaccagggacacgtccacgagcacagtctacatggagctgagcagcctgagatctgaggacacggccgtgtattactgtgctagaggtgactcgtcttcatggtacgactattactactacatggacgtctggggcaaagggaccacggtcaccgtctcctcaggtggaggcggttcaggcggaggtggctctggcggtggcggatcggacatccagatgacccagtctccatcctccctgtctgcatctgtaggagacagagtcaccatcacttgccaagcaagtcaggatattagcaactatttaaattggtatcagcagaaaccagggaaagcccctaagctcctgatctatgctgcatccagtttgcaaagtggggtcccatcaaggttcagtggcagtggatctgggacagatttcactctcaccatcagcagtctgcaacctgaagattttgcaacttactactgtcaacagagttaccggacccctctcactttcggcggagggaccaaggtggagatcaaaaccacgacgccagcgccgcggccaccaacaccggcgcccaccatcgcgtcgcagcccctgtccctgcgcccagaggcgtgccggccagcggcggggggcgcagtgcacacgagggggctggacttcgcctgtgatatctacatctgggcgcccttggccgggacttgtggggtccttctcctgtcactggttatcaccctttactgccggagggaccagaggctgccccccgatgcccacaagccccctgggggaggcagtttccggacccccatccaagaggagcaggccgacgcccactccaccctggccaagatcagagtgaagttcagcaggagcgcagacgcccccgcgtaccagcagggccagaaccagctctataacgagctcaatctaggacgaagagaggagtacgatgttttggacaagagacgtggccgggaccctgagatggggggaaagccgagaaggaagaaccctcaggaaggcctgtacaatgaactgcagaaagataagatggcggaggcctacagtgagattgggatgaaaggcgagcgccggaggggcaaggggcacgatggcctttaccagggtctcagtacagccaccaaggacacctacgacgcccttcacatgcaggccctgccccctcgcggctctggcgagggaaggggttccctgcttacttgcggcgacgtcgaagagaatcccggtccgatggccctcccagtaactgccctccttttgcccctcgcactccttcttcatgccgctcgccccaactgggtcaacgtgattagcgatttgaagaaaatcgaggaccttatacagtctatgcatattgacgctacactgtatactgagagtgatgtacacccgtcctgtaaggtaacggccatgaaatgctttcttctggagctccaggtcatcagcttggagtctggggacgcaagcatccacgatacggttgaaaacctcatcatccttgcgaacaactctctctcatctaatggaaacgttacagagagtgggtgtaaggagtgcgaagagttggaagaaaaaaacatcaaagaatttcttcaatccttcgttcacatagtgcaaatgttcattaacacgtccactaccacacccgccccgaggccacctacgccggcaccgactatcgccagtcaacccctctctctgcgccccgaggcttgccggcctgcggctggtggggcggtccacacccggggcctggattttgcgtgcgatatatacatctgggcacctcttgccggcacctgcggagtgctgcttctctcactcgttattacgctgtactgctaa

SEQ ID NO: 329 - DNA, 2172 bp, synthetic construct
  source 1..2172: mol_type = other DNA
atggccttaccagtgaccgccttgctcctgccgctggccttgctgctccacgccgccaggccggactacaaagacgatgacgataaaggcggtggtggctctggtggtggcggatcccaggtgcagctggtgcagtctggggctgaggtgaagaagcctggggcctcagtgaaggtttcctgcaaggcatctggatacaccttcaccgactactttacccactgggtgcgacaggcccctggacaagggcttgagtggatgggatggatcaacacatatgacggtaatacaaattacgcacagaagttccagggcagagtcaccatgaccagggacacgtccacgagcacagtctacatggagctgagcagcctgagatctgaggacacggccgtgtattactgtgctagagaaatggagtggctcggccaggtggactactggggccaagggaccctggtcaccgtctcctcaggtggaggcggttcaggcggaggtggctctggcggtggcggatcggacatccagatgacccagtctccatcctccctgtctgcatctgtaggagacagagtcaccatcacttgccgggcaagtcaggatattcgcaacgatttagggtggtatcagcagaaaccagggaaagcccctaagctcctgatctatgctgcatccaacttggagaccggggtcccatcaaggttcagtggcagtggatctgggacagatttcactctcaccatcagcagtctgcaacctgaagattttgcaacttactactgtcaacagagttacagtgcacctttcactttcggccctgggaccaaagtggatatcaaaaccacgacgccagcgccgcggccaccaacaccggcgcccaccatcgcgtcgcagcccctgtccctgcgcccagaggcgtgccggccagcggcggggggcgcagtgcacacgagggggctggacttcgcctgtgatatctacatctgggcgcccttggccgggacttgtggggtccttctcctgtcactggttatcaccctttactgccggagggaccagaggctgccccccgatgcccacaagccccctgggggaggcagtttccggacccccatccaagaggagcaggccgacgcccactccaccctggccaagatcagagtgaagttcagcaggagcgcagacgcccccgcgtaccagcagggccagaaccagctctataacgagctcaatctaggacgaagagaggagtacgatgttttggacaagagacgtggccgggaccctgagatggggggaaagccgagaaggaagaaccctcaggaaggcctgtacaatgaactgcagaaagataagatggcggaggcctacagtgagattgggatgaaaggcgagcgccggaggggcaaggggcacgatggcctttaccagggtctcagtacagccaccaaggacacctacgacgcccttcacatgcaggccctgccccctcgcggctctggcgagggaaggggttccctgcttacttgcggcgacgtcgaagagaatcccggtccgatggccctcccagtaactgccctccttttgcccctcgcactccttcttcatgccgctcgccccaactgggtcaacgtgattagcgatttgaagaaaatcgaggaccttatacagtctatgcatattgacgctacactgtatactgagagtgatgtacacccgtcctgtaaggtaacggccatgaaatgctttcttctggagctccaggtcatcagcttggagtctggggacgcaagcatccacgatacggttgaaaacctcatcatccttgcgaacaactctctctcatctaatggaaacgttacagagagtgggtgtaaggagtgcgaagagttggaagaaaaaaacatcaaagaatttcttcaatccttcgttcacatagtgcaaatgttcattaacacgtccactaccacacccgccccgaggccacctacgccggcaccgactatcgccagtcaacccctctctctgcgccccgaggcttgccggcctgcggctggtggggcggtccacacccggggcctggattttgcgtgcgatatatacatctgggcacctcttgccggcacctgcggagtgctgcttctctcactcgttattacgctgtactgctaa

SEQ ID NO: 330 - DNA, 2172 bp, synthetic construct
  source 1..2172: mol_type = other DNA
atggccttaccagtgaccgccttgctcctgccgctggccttgctgctccacgccgccaggccggactacaaagacgatgacgataaaggcggtggtggctctggtggtggcggatcccaggtgcagctggtgcagtctggggctgaggtgaagaagcctggggcctcagtgaaggtttcctgcaaggcatctggatacaccttcaccagctactatatacactgggtgcgacaggcccctggacaagggcttgagtggatgggacgaatcaaccctaatggtggagggacaaactacgcacagaagttccagggcagagtcaccatgaccagggacacgtccacgagcacagtctacatggagctgagcagcctgagatctgaggacacggccgtgtattactgtgctagaggccacagagggggtggcgggattgactactggggccaagggaccctggtcaccgtctcctcaggtggaggcggttcaggcggaggtggctctggcggtggcggatcggacatccagatgacccagtctccatcctccctgtctgcatctgtaggagacagagtcaccatcacttgccgggcaagtcaggagattagcaactatttagcctggtatcagcagaaaccagggaaagcccctaagctcctgatctatgatgcatccaacttgcaaactggggtcccatcaaggttcagtggcagtggatctgggacagatttcactctcaccatcagcagtctgcaacctgaagattttgcaacttactactgtcaacagagttacagtacccctttcactttcggccctgggaccaaagtggatatcaaaaccacgacgccagcgccgcggccaccaacaccggcgcccaccatcgcgtcgcagcccctgtccctgcgcccagaggcgtgccggccagcggcggggggcgcagtgcacacgagggggctggacttcgcctgtgatatctacatctgggcgcccttggccgggacttgtggggtccttctcctgtcactggttatcaccctttactgccggagggaccagaggctgccccccgatgcccacaagccccctgggggaggcagtttccggacccccatccaagaggagcaggccgacgcccactccaccctggccaagatcagagtgaagttcagcaggagcgcagacgcccccgcgtaccagcagggccagaaccagctctataacgagctcaatctaggacgaagagaggagtacgatgttttggacaagagacgtggccgggaccctgagatggggggaaagccgagaaggaagaaccctcaggaaggcctgtacaatgaactgcagaaagataagatggcggaggcctacagtgagattgggatgaaaggcgagcgccggaggggcaaggggcacgatggcctttaccagggtctcagtacagccaccaaggacacctacgacgcccttcacatgcaggccctgccccctcgcggctctggcgagggaaggggttccctgcttacttgcggcgacgtcgaagagaatcccggtccgatggccctcccagtaactgccctccttttgcccctcgcactccttcttcatgccgctcgccccaactgggtcaacgtgattagcgatttgaagaaaatcgaggaccttatacagtctatgcatattgacgctacactgtatactgagagtgatgtacacccgtcctgtaaggtaacggccatgaaatgctttcttctggagctccaggtcatcagcttggagtctggggacgcaagcatccacgatacggttgaaaacctcatcatccttgcgaacaactctctctcatctaatggaaacgttacagagagtgggtgtaaggagtgcgaagagttggaagaaaaaaacatcaaagaatttcttcaatccttcgttcacatagtgcaaatgttcattaacacgtccactaccacacccgccccgaggccacctacgccggcaccgactatcgccagtcaacccctctctctgcgccccgaggcttgccggcctgcggctggtggggcggtccacacccggggcctggattttgcgtgcgatatatacatctgggcacctcttgccggcacctgcggagtgctgcttctctcactcgttattacgctgtactgctaa

SEQ ID NO: 331 - DNA, 2172 bp, synthetic construct
  source 1..2172: mol_type = other DNA
atggccttaccagtgaccgccttgctcctgccgctggccttgctgctccacgccgccaggccggactacaaagacgatgacgataaaggcggtggtggctctggtggtggcggatcccaggtgcagctggtgcagtctggggctgaggtgaagaagcctggggcctcagtgaaggtttcctgcaaggcatctggaggtaccttcagtagctacgcaatttcatgggtgcgacaggcccctggacaagggcttgagtggatgggatggatctctcccaacagtggtgacacacactacgcacagaagttccagggcagagtcaccatgaccagggacacgtccacgagcacagtctacatggagctgagcagcctgagatctgaggacacggccgtgtattactgtgctagagactgggggtcaggctggtacgtggactactggggccaagggaccctggtcaccgtctcctcaggtggaggcggttcaggcggaggtggctctggcggtggcggatcggacatccagatgacccagtctccatcctccctgtctgcatctgtaggagacagagtcaccatcacttgccaggcaagtcaggacattagcgattctttaaattggtatcagcagaaaccagggaaagcccctaagctcctgatctattccgcatccagtttgcaaagtggggtcccatcaaggttcagtggcagtggatctgggacagatttcactctcaccatcagcagtctgcaacctgaagattttgcaacttactactgtcaacagagttttacaaccccttatacgttcggccaagggaccaaggtggaaatcaaaaccacgacgccagcgccgcggccaccaacaccggcgcccaccatcgcgtcgcagcccctgtccctgcgcccagaggcgtgccggccagcggcggggggcgcagtgcacacgagggggctggacttcgcctgtgatatctacatctgggcgcccttggccgggacttgtggggtccttctcctgtcactggttatcaccctttactgccggagggaccagaggctgccccccgatgcccacaagccccctgggggaggcagtttccggacccccatccaagaggagcaggccgacgcccactccaccctggccaagatcagagtgaagttcagcaggagcgcagacgcccccgcgtaccagcagggccagaaccagctctataacgagctcaatctaggacgaagagaggagtacgatgttttggacaagagacgtggccgggaccctgagatggggggaaagccgagaaggaagaaccctcaggaaggcctgtacaatgaactgcagaaagataagatggcggaggcctacagtgagattgggatgaaaggcgagcgccggaggggcaaggggcacgatggcctttaccagggtctcagtacagccaccaaggacacctacgacgcccttcacatgcaggccctgccccctcgcggctctggcgagggaaggggttccctgcttacttgcggcgacgtcgaagagaatcccggtccgatggccctcccagtaactgccctccttttgcccctcgcactccttcttcatgccgctcgccccaactgggtcaacgtgattagcgatttgaagaaaatcgaggaccttatacagtctatgcatattgacgctacactgtatactgagagtgatgtacacccgtcctgtaaggtaacggccatgaaatgctttcttctggagctccaggtcatcagcttggagtctggggacgcaagcatccacgatacggttgaaaacctcatcatccttgcgaacaactctctctcatctaatggaaacgttacagagagtgggtgtaaggagtgcgaagagttggaagaaaaaaacatcaaagaatttcttcaatccttcgttcacatagtgcaaatgttcattaacacgtccactaccacacccgccccgaggccacctacgccggcaccgactatcgccagtcaacccctctctctgcgccccgaggcttgccggcctgcggctggtggggcggtccacacccggggcctggattttgcgtgcgatatatacatctgggcacctcttgccggcacctgcggagtgctgcttctctcactcgttattacgctgtactgctaa

SEQ ID NO: 332 - DNA, 2172 bp, synthetic construct
  source 1..2172: mol_type = other DNA
atggccttaccagtgaccgccttgctcctgccgctggccttgctgctccacgccgccaggccggactacaaagacgatgacgataaaggcggtggtggctctggtggtggcggatcccaggtgcagctggtgcagtctggggctgaggtgaagaagcctgggtcctcggtgaaggtctcctgcaaggcttctggaggcaccttcaatagctatggaatcagctgggtgcgacaggcccctggacaagggcttgagtggatgggaggtatcatccctatctttggtacagcaaactacgcacagaagttccagggcagagtcacgattaccgcggacgaatccacgagcacagcctacatggagctgagcagcctgagatctgaggacacggccgtgtattactgtgcgagagatacctacggggatgacgcttttgatatctggggccaagggacaatggtcaccgtctcttcaggtggaggcggttcaggcggaggtggctctggcggtggcggatcggacatccagatgacccagtctccatcttctctgtctgcatctgtaggagacagagtcaccatcacttgtcgggcgagtcagtctattagcagctggttagcctggtatcagcagaaaccagggaaagcccctaagctcctgatctatgatgcatccaatttggaaacaggggtcccatcaaggttcagcggcagtggatctgggacagatttcactctcactatcagcagcctgcagcctgaagattttgcaacttactattgtcaacagaatttcagtcctcctctcaccttcggccaagggacacgactggagattaaaaccacgacgccagcgccgcggccaccaacaccggcgcccaccatcgcgtcgcagcccctgtccctgcgcccagaggcgtgccggccagcggcggggggcgcagtgcacacgagggggctggacttcgcctgtgatatctacatctgggcgcccttggccgggacttgtggggtccttctcctgtcactggttatcaccctttactgccggagggaccagaggctgccccccgatgcccacaagccccctgggggaggcagtttccggacccccatccaagaggagcaggccgacgcccactccaccctggccaagatcagagtgaagttcagcaggagcgcagacgcccccgcgtaccagcagggccagaaccagctctataacgagctcaatctaggacgaagagaggagtacgatgttttggacaagagacgtggccgggaccctgagatggggggaaagccgagaaggaagaaccctcaggaaggcctgtacaatgaactgcagaaagataagatggcggaggcctacagtgagattgggatgaaaggcgagcgccggaggggcaaggggcacgatggcctttaccagggtctcagtacagccaccaaggacacctacgacgcccttcacatgcaggccctgccccctcgcggctctggcgagggaaggggttccctgcttacttgcggcgacgtcgaagagaatcccggtccgatggccctcccagtaactgccctccttttgcccctcgcactccttcttcatgccgctcgccccaactgggtcaacgtgattagcgatttgaagaaaatcgaggaccttatacagtctatgcatattgacgctacactgtatactgagagtgatgtacacccgtcctgtaaggtaacggccatgaaatgctttcttctggagctccaggtcatcagcttggagtctggggacgcaagcatccacgatacggttgaaaacctcatcatccttgcgaacaactctctctcatctaatggaaacgttacagagagtgggtgtaaggagtgcgaagagttggaagaaaaaaacatcaaagaatttcttcaatccttcgttcacatagtgcaaatgttcattaacacgtccactaccacacccgccccgaggccacctacgccggcaccgactatcgccagtcaacccctctctctgcgccccgaggcttgccggcctgcggctggtggggcggtccacacccggggcctggattttgcgtgcgatatatacatctgggcacctcttgccggcacctgcggagtgctgcttctctcactcgttattacgctgtactgctaa

SEQ ID NO: 333 - DNA, 2187 bp, synthetic construct
  source 1..2187: mol_type = other DNA
atggccttaccagtgaccgccttgctcctgccgctggccttgctgctccacgccgccaggccggactacaaagacgatgacgataaaggcggtggtggctctggtggtggcggatcccaggtgcagctggtgcagtctggggctgaggtgaagaagcctggggcctcagtgaaggtttcctgcaaggcatctggatacagtttcaccagctactatatgcactgggtgcgacaggcccctggacaagggcttgagtggatgggaataatcaaccctagtggtgggactacaagctacgcacagaagttccagggcagagtcaccatgaccagggacacgtccacgagcacagtctacatggagctgagcagcctgagatctgaggacacggccgtgtattactgtgctagagacaattccccgtatagctcaagctggtgggactactttgactactggggccaagggaccctggtcaccgtctcctcaggtggaggcggttcaggcggaggtggctctggcggtggcggatcggacatccagatgacccagtctccatcctccctgtctgcatctgtaggagacagagtcaccatcacttgccgggcaagtcaggacattcggcattatttagcatggtatcagcagaaaccagggaaagcccctaagctcctgatctatgacgcatccagtttgcaaagtggggtcccatcaaggttcagtggcagtggatctgggacagatttcactctcaccatcagcagtctgcaacctgaagattttgcaacttactactgtcaacagacctacgacgcacctatcaccttcggccaagggacacgactggagattaaaaccacgacgccagcgccgcggccaccaacaccggcgcccaccatcgcgtcgcagcccctgtccctgcgcccagaggcgtgccggccagcggcggggggcgcagtgcacacgagggggctggacttcgcctgtgatatctacatctgggcgcccttggccgggacttgtggggtccttctcctgtcactggttatcaccctttactgccggagggaccagaggctgccccccgatgcccacaagccccctgggggaggcagtttccggacccccatccaagaggagcaggccgacgcccactccaccctggccaagatcagagtgaagttcagcaggagcgcagacgcccccgcgtaccagcagggccagaaccagctctataacgagctcaatctaggacgaagagaggagtacgatgttttggacaagagacgtggccgggaccctgagatggggggaaagccgagaaggaagaaccctcaggaaggcctgtacaatgaactgcagaaagataagatggcggaggcctacagtgagattgggatgaaaggcgagcgccggaggggcaaggggcacgatggcctttaccagggtctcagtacagccaccaaggacacctacgacgcccttcacatgcaggccctgccccctcgcggctctggcgagggaaggggttccctgcttacttgcggcgacgtcgaagagaatcccggtccgatggccctcccagtaactgccctccttttgcccctcgcactccttcttcatgccgctcgccccaactgggtcaacgtgattagcgatttgaagaaaatcgaggaccttatacagtctatgcatattgacgctacactgtatactgagagtgatgtacacccgtcctgtaaggtaacggccatgaaatgctttcttctggagctccaggtcatcagcttggagtctggggacgcaagcatccacgatacggttgaaaacctcatcatccttgcgaacaactctctctcatctaatggaaacgttacagagagtgggtgtaaggagtgcgaagagttggaagaaaaaaacatcaaagaatttcttcaatccttcgttcacatagtgcaaatgttcattaacacgtccactaccacacccgccccgaggccacctacgccggcaccgactatcgccagtcaacccctctctctgcgccccgaggcttgccggcctgcggctggtggggcggtccacacccggggcctggattttgcgtgcgatatatacatctgggcacctcttgccggcacctgcggagtgctgcttctctcactcgttattacgctgtactgctaa

SEQ ID NO: 334 - DNA, 2181 bp, synthetic construct
  source 1..2181: mol_type = other DNA
atggccttaccagtgaccgccttgctcctgccgctggccttgctgctccacgccgccaggccggactacaaagacgatgacgataaaggcggtggtggctctggtggtggcggatcccaggtgcagctggtgcagtctggggctgaggtgaagaagcctggggcctcagtgaaggtttcctgcaaggcatctggatacaccttcaccgattactatattcactgggtgcgacaggcccctggacaagggcttgagtggatgggatggatcaccccgaacagtggttatacatattacgcacagaatttccagggcagagtcaccatgaccagggacacgtccacgagcacagtctacatggagctgagcagcctgagatctgaggacacggccgtgtattactgtgctagaaacacagactgttatggggacttcctggggctggatgtctggggccaagggacaacggtcaccgtctcttcaggtggaggcggttcaggcggaggtggctctggcggtggcggatcggacatcgtgatgacccagtctccagactccctggctgtgtctctgggcgagagggccaccatcaactgccgggccagctctagtatttccaactacttagcttggtaccagcagaaaccaggacagcctcctaagctgctcatttacggcgcatctacccgggcttccggggtccctgaccgattcagtggcagcgggtctgggacagatttcactctcaccatcagcagcctgcaggctgaagatgtggcagtttattactgtcagcaaagctatagtactcctctcactttcggccaggggaccaaggtggagatcaaaaccacgacgccagcgccgcggccaccaacaccggcgcccaccatcgcgtcgcagcccctgtccctgcgcccagaggcgtgccggccagcggcggggggcgcagtgcacacgagggggctggacttcgcctgtgatatctacatctgggcgcccttggccgggacttgtggggtccttctcctgtcactggttatcaccctttactgccggagggaccagaggctgccccccgatgcccacaagccccctgggggaggcagtttccggacccccatccaagaggagcaggccgacgcccactccaccctggccaagatcagagtgaagttcagcaggagcgcagacgcccccgcgtaccagcagggccagaaccagctctataacgagctcaatctaggacgaagagaggagtacgatgttttggacaagagacgtggccgggaccctgagatggggggaaagccgagaaggaagaaccctcaggaaggcctgtacaatgaactgcagaaagataagatggcggaggcctacagtgagattgggatgaaaggcgagcgccggaggggcaaggggcacgatggcctttaccagggtctcagtacagccaccaaggacacctacgacgcccttcacatgcaggccctgccccctcgcggctctggcgagggaaggggttccctgcttacttgcggcgacgtcgaagagaatcccggtccgatggccctcccagtaactgccctccttttgcccctcgcactccttcttcatgccgctcgccccaactgggtcaacgtgattagcgatttgaagaaaatcgaggaccttatacagtctatgcatattgacgctacactgtatactgagagtgatgtacacccgtcctgtaaggtaacggccatgaaatgctttcttctggagctccaggtcatcagcttggagtctggggacgcaagcatccacgatacggttgaaaacctcatcatccttgcgaacaactctctctcatctaatggaaacgttacagagagtgggtgtaaggagtgcgaagagttggaagaaaaaaacatcaaagaatttcttcaatccttcgttcacatagtgcaaatgttcattaacacgtccactaccacacccgccccgaggccacctacgccggcaccgactatcgccagtcaacccctctctctgcgccccgaggcttgccggcctgcggctggtggggcggtccacacccggggcctggattttgcgtgcgatatatacatctgggcacctcttgccggcacctgcggagtgctgcttctctcactcgttattacgctgtactgctaa

SEQ ID NO: 335 - DNA, 2181 bp, synthetic construct
  source 1..2181: mol_type = other DNA
atggccttaccagtgaccgccttgctcctgccgctggccttgctgctccacgccgccaggccggactacaaagacgatgacgataaaggcggtggtggctctggtggtggcggatcccaggtgcagctggtgcagtctggggctgaggtgaagaagcctggggcctcagtgaaggtttcctgcaaggcatctggatacaccttcaacggctaccttatgcactgggtgcgacaggcccctggacaagggcttgagtggatgggaatagttaacccttccgatggtagcacaggctacgcacagaagttccagggcagagtcaccatgaccagggacacgtccacgagcacagtctacatggagctgagcagcctgagatctgaggacacggccgtgtattactgtgcgaaggacacaggactccgctactttgactggctacttgactactggggccaagggaccctggtcaccgtctcctcaggtggaggcggttcaggcggaggtggctctggcggtggcggatcggacatccagatgacccagtctccatcctccctgtctgcatctgtaggagacagagtcaccatcacttgccgggcgagtcagggcattaccaattttttagcctggtatcagcagaaaccagggaaagcccctaagctcctgatatatgatgcatccaacttggaaaccggggtcccatccaggttcagtggcagtggatctgggacggatttcactctcaccatcagcagcctgcagcctgaagattttgcaacttattactgtcaacagagctatggggcccctcttaccttcggccaagggacacgactggagattaaaaccacgacgccagcgccgcggccaccaacaccggcgcccaccatcgcgtcgcagcccctgtccctgcgcccagaggcgtgccggccagcggcggggggcgcagtgcacacgagggggctggacttcgcctgtgatatctacatctgggcgcccttggccgggacttgtggggtccttctcctgtcactggttatcaccctttactgccggagggaccagaggctgccccccgatgcccacaagccccctgggggaggcagtttccggacccccatccaagaggagcaggccgacgcccactccaccctggccaagatcagagtgaagttcagcaggagcgcagacgcccccgcgtaccagcagggccagaaccagctctataacgagctcaatctaggacgaagagaggagtacgatgttttggacaagagacgtggccgggaccctgagatggggggaaagccgagaaggaagaaccctcaggaaggcctgtacaatgaactgcagaaagataagatggcggaggcctacagtgagattgggatgaaaggcgagcgccggaggggcaaggggcacgatggcctttaccagggtctcagtacagccaccaaggacacctacgacgcccttcacatgcaggccctgccccctcgcggctctggcgagggaaggggttccctgcttacttgcggcgacgtcgaagagaatcccggtccgatggccctcccagtaactgccctccttttgcccctcgcactccttcttcatgccgctcgccccaactgggtcaacgtgattagcgatttgaagaaaatcgaggaccttatacagtctatgcatattgacgctacactgtatactgagagtgatgtacacccgtcctgtaaggtaacggccatgaaatgctttcttctggagctccaggtcatcagcttggagtctggggacgcaagcatccacgatacggttgaaaacctcatcatccttgcgaacaactctctctcatctaatggaaacgttacagagagtgggtgtaaggagtgcgaagagttggaagaaaaaaacatcaaagaatttcttcaatccttcgttcacatagtgcaaatgttcattaacacgtccactaccacacccgccccgaggccacctacgccggcaccgactatcgccagtcaacccctctctctgcgccccgaggcttgccggcctgcggctggtggggcggtccacacccggggcctggattttgcgtgcgatatatacatctgggcacctcttgccggcacctgcggagtgctgcttctctcactcgttattacgctgtactgctaa

SEQ ID NO: 336 - DNA, 2169 bp, synthetic construct
  source 1..2169: mol_type = other DNA
atggccttaccagtgaccgccttgctcctgccgctggccttgctgctccacgccgccaggccggactacaaagacgatgacgataaaggcggtggtggctctggtggtggcggatcccaggtgcagctggtgcagtctggggctgaggtgaagaagcctggggcctcagtgaaggtttcctgcaaggcatctggatacaccttcaccagctactatatgcactgggtgcgacaggcccctggacaagggcttgagtggatgggaataatcgatcctagtggtggccgaacaatttacgcacagcgcttccagggcagagtcaccatgaccagggacacgtccacgagcacagtctacatggagctgagcagcctgagatctgaggacacggccgtgtattactgtgctagacacgaagcaggcggaatctttgactactggggccaagggaccctggtcaccgtctcctcaggtggaggcggttcaggcggaggtggctctggcggtggcggatcggacatccagatgacccagtctccatcctccctgtctgcatctgtaggagacagagtcaccatcacttgccaagcaagtcaggacattagcaactatttaaattggtatcagcagaaaccagggaaagcccctaagctcctgatctattccgcatccaccttgcaaagtggggtcccatcaaggttcagtggcagtggatctgggacagatttcactctcaccatcagcagtctgcaacctgaagattttgcaacttactactgtcaacagagttacagttctccttatagattcggccaagggaccaaggtggaaatcaaaaccacgacgccagcgccgcggccaccaacaccggcgcccaccatcgcgtcgcagcccctgtccctgcgcccagaggcgtgccggccagcggcggggggcgcagtgcacacgagggggctggacttcgcctgtgatatctacatctgggcgcccttggccgggacttgtggggtccttctcctgtcactggttatcaccctttactgccggagggaccagaggctgccccccgatgcccacaagccccctgggggaggcagtttccggacccccatccaagaggagcaggccgacgcccactccaccctggccaagatcagagtgaagttcagcaggagcgcagacgcccccgcgtaccagcagggccagaaccagctctataacgagctcaatctaggacgaagagaggagtacgatgttttggacaagagacgtggccgggaccctgagatggggggaaagccgagaaggaagaaccctcaggaaggcctgtacaatgaactgcagaaagataagatggcggaggcctacagtgagattgggatgaaaggcgagcgccggaggggcaaggggcacgatggcctttaccagggtctcagtacagccaccaaggacacctacgacgcccttcacatgcaggccctgccccctcgcggctctggcgagggaaggggttccctgcttacttgcggcgacgtcgaagagaatcccggtccgatggccctcccagtaactgccctccttttgcccctcgcactccttcttcatgccgctcgccccaactgggtcaacgtgattagcgatttgaagaaaatcgaggaccttatacagtctatgcatattgacgctacactgtatactgagagtgatgtacacccgtcctgtaaggtaacggccatgaaatgctttcttctggagctccaggtcatcagcttggagtctggggacgcaagcatccacgatacggttgaaaacctcatcatccttgcgaacaactctctctcatctaatggaaacgttacagagagtgggtgtaaggagtgcgaagagttggaagaaaaaaacatcaaagaatttcttcaatccttcgttcacatagtgcaaatgttcattaacacgtccactaccacacccgccccgaggccacctacgccggcaccgactatcgccagtcaacccctctctctgcgccccgaggcttgccggcctgcggctggtggggcggtccacacccggggcctggattttgcgtgcgatatatacatctgggcacctcttgccggcacctgcggagtgctgcttctctcactcgttattacgctgtactgctaa

SEQ ID NO: 337 - DNA, 2193 bp, synthetic construct
  source 1..2193: mol_type = other DNA
atggccttaccagtgaccgccttgctcctgccgctggccttgctgctccacgccgccaggccggactacaaagacgatgacgataaaggcggtggtggctctggtggtggcggatcccaggtccagctggtgcagtctggggctgaggtgaagaagcctgggtcctcagtgaaggtctcctgcaaggcttctggatataccttcagcgactcctacatgcattgggtgcgacaggcccctggacaagggcttgagtgggtcggagggatcatccctatggcaggtatacccgcctacgcagaggaattccagggcagagtcacgattaccgcggacgagtccacgagcacagcctacatggagctgagcagcctgagatctgaggacacggccgtgtattactgtgcgagagccgacgattatgggggaaattggtacttcgatctctggggccgtggcaccctggtcactgtctcctcaggtggaggcggttcaggcggaggtggctctggcggtggcggatcggatattgtgatgactcagtctccactctccctgcccgtcacccctggagagccggcctccatctcctgcaggtctagtcagagcctcctccactctaatggctacaactatttggattggtacctgcagaagccagggcagtctccacagctcctgatctatgcagcttctagtctccagtccggggtccctgacaggttcagtggcagtggatcaggcacagattttacactgaaaatcagcagagtggaggctgaggatgttggggtttattactgcatgcaaggggcccattggcctccgacttttggccaggggaccaagctggagatcaaaaccacgacgccagcgccgcggccaccaacaccggcgcccaccatcgcgtcgcagcccctgtccctgcgcccagaggcgtgccggccagcggcggggggcgcagtgcacacgagggggctggacttcgcctgtgatatctacatctgggcgcccttggccgggacttgtggggtccttctcctgtcactggttatcaccctttactgccggagggaccagaggctgccccccgatgcccacaagccccctgggggaggcagtttccggacccccatccaagaggagcaggccgacgcccactccaccctggccaagatcagagtgaagttcagcaggagcgcagacgcccccgcgtaccagcagggccagaaccagctctataacgagctcaatctaggacgaagagaggagtacgatgttttggacaagagacgtggccgggaccctgagatggggggaaagccgagaaggaagaaccctcaggaaggcctgtacaatgaactgcagaaagataagatggcggaggcctacagtgagattgggatgaaaggcgagcgccggaggggcaaggggcacgatggcctttaccagggtctcagtacagccaccaaggacacctacgacgcccttcacatgcaggccctgccccctcgcggctctggcgagggaaggggttccctgcttacttgcggcgacgtcgaagagaatcccggtccgatggccctcccagtaactgccctccttttgcccctcgcactccttcttcatgccgctcgccccaactgggtcaacgtgattagcgatttgaagaaaatcgaggaccttatacagtctatgcatattgacgctacactgtatactgagagtgatgtacacccgtcctgtaaggtaacggccatgaaatgctttcttctggagctccaggtcatcagcttggagtctggggacgcaagcatccacgatacggttgaaaacctcatcatccttgcgaacaactctctctcatctaatggaaacgttacagagagtgggtgtaaggagtgcgaagagttggaagaaaaaaacatcaaagaatttcttcaatccttcgttcacatagtgcaaatgttcattaacacgtccactaccacacccgccccgaggccacctacgccggcaccgactatcgccagtcaacccctctctctgcgccccgaggcttgccggcctgcggctggtggggcggtccacacccggggcctggattttgcgtgcgatatatacatctgggcacctcttgccggcacctgcggagtgctgcttctctcactcgttattacgctgtactgctaa

SEQ ID NO: 338 - DNA, 2175 bp, synthetic construct
  source 1..2175: mol_type = other DNA
atggccttaccagtgaccgccttgctcctgccgctggccttgctgctccacgccgccaggccggactacaaagacgatgacgataaaggcggtggtggctctggtggtggcggatcccaggtgcagctggtgcagtctggggctgaggtgaagaagcctggggcctcagtgaaggtttcctgcaaggcatctggatacatcttcaccgactactatatgcactgggtgcgacaggcccctggacaagggcttgagtggatgggaataatcaaccctagtggtggcagcacaagctacgcacagaagttccagggcagagtcaccatgaccagggacacgtccacgagcacagtctacatggagctgagcagcctgagatctgaggacacggccgtgtattactgtgctagagactcaggatggtatgagtcctggttcgacccctggggccagggaaccctggtcaccgtctcctcaggtggaggcggttcaggcggaggtggctctggcggtggcggatcggacatccagatgacccagtctccatcctccctgtctgcatctgtaggagacagagtcaccatcacttgccgggcaagtcaggacattagggatgggttaggctggtatcagcagaaaccagggaaagcccctaagctcctgatctatgctgcatccactttgcaaagtggggtcccatcaaggttcagtggcagtggatctgggacagatttcactctcaccatcagcagtctgcaacctgaagattttgcaacttactactgtcaacagagttacgggacccctcctacgttcggccaagggaccaaggtggaaatcaaaaccacgacgccagcgccgcggccaccaacaccggcgcccaccatcgcgtcgcagcccctgtccctgcgcccagaggcgtgccggccagcggcggggggcgcagtgcacacgagggggctggacttcgcctgtgatatctacatctgggcgcccttggccgggacttgtggggtccttctcctgtcactggttatcaccctttactgccggagggaccagaggctgccccccgatgcccacaagccccctgggggaggcagtttccggacccccatccaagaggagcaggccgacgcccactccaccctggccaagatcagagtgaagttcagcaggagcgcagacgcccccgcgtaccagcagggccagaaccagctctataacgagctcaatctaggacgaagagaggagtacgatgttttggacaagagacgtggccgggaccctgagatggggggaaagccgagaaggaagaaccctcaggaaggcctgtacaatgaactgcagaaagataagatggcggaggcctacagtgagattgggatgaaaggcgagcgccggaggggcaaggggcacgatggcctttaccagggtctcagtacagccaccaaggacacctacgacgcccttcacatgcaggccctgccccctcgcggctctggcgagggaaggggttccctgcttacttgcggcgacgtcgaagagaatcccggtccgatggccctcccagtaactgccctccttttgcccctcgcactccttcttcatgccgctcgccccaactgggtcaacgtgattagcgatttgaagaaaatcgaggaccttatacagtctatgcatattgacgctacactgtatactgagagtgatgtacacccgtcctgtaaggtaacggccatgaaatgctttcttctggagctccaggtcatcagcttggagtctggggacgcaagcatccacgatacggttgaaaacctcatcatccttgcgaacaactctctctcatctaatggaaacgttacagagagtgggtgtaaggagtgcgaagagttggaagaaaaaaacatcaaagaatttcttcaatccttcgttcacatagtgcaaatgttcattaacacgtccactaccacacccgccccgaggccacctacgccggcaccgactatcgccagtcaacccctctctctgcgccccgaggcttgccggcctgcggctggtggggcggtccacacccggggcctggattttgcgtgcgatatatacatctgggcacctcttgccggcacctgcggagtgctgcttctctcactcgttattacgctgtactgctaa

SEQ ID NO: 339 - DNA, 2178 bp, synthetic construct
  source 1..2178: mol_type = other DNA
atggccttaccagtgaccgccttgctcctgccgctggccttgctgctccacgccgccaggccggactacaaagacgatgacgataaaggcggtggtggctctggtggtggcggatcccaggtgcagctggtgcagtctggggctgaggtgaagaagcctggggcctcagtgaaggtttcctgcaaggcatctggatacaccttcaccgactactatcttcactgggtgcgacaggcccctggacaagggcttgagtggatgggatggatcagcgcctacaatggtaacacaaattacgcacagaagttccagggcagagtcaccatgaccagggacacgtccacgagcacagtctacatggagctgagcagcctgagatctgaggacacggccgtgtattactgtgctagagagattgtgggtgctacagaagattggtacttcgatctctggggccgtggcaccctggtcactgtctcctcaggtggaggcggttcaggcggaggtggctctggcggtggcggatcggaaatagtgatgacgcagtctccagccaccctgtctgtgtctccaggggaaagagccaccctctcctgcagggccagtcagagtgttagcagctatttagcctggtaccagcagaaacctggccaggctcccaggctcctcatctatggtgcatccaccagggccactggtatcccagccaggttcagtggcagtgggtctgggacagagttcactctcaccatcagcagcctgcagtctgaagattttgcagtttattactgtcagcagtatgattcctcccctacgttcggccaagggaccaaggtggaaatcaaaaccacgacgccagcgccgcggccaccaacaccggcgcccaccatcgcgtcgcagcccctgtccctgcgcccagaggcgtgccggccagcggcggggggcgcagtgcacacgagggggctggacttcgcctgtgatatctacatctgggcgcccttggccgggacttgtggggtccttctcctgtcactggttatcaccctttactgccggagggaccagaggctgccccccgatgcccacaagccccctgggggaggcagtttccggacccccatccaagaggagcaggccgacgcccactccaccctggccaagatcagagtgaagttcagcaggagcgcagacgcccccgcgtaccagcagggccagaaccagctctataacgagctcaatctaggacgaagagaggagtacgatgttttggacaagagacgtggccgggaccctgagatggggggaaagccgagaaggaagaaccctcaggaaggcctgtacaatgaactgcagaaagataagatggcggaggcctacagtgagattgggatgaaaggcgagcgccggaggggcaaggggcacgatggcctttaccagggtctcagtacagccaccaaggacacctacgacgcccttcacatgcaggccctgccccctcgcggctctggcgagggaaggggttccctgcttacttgcggcgacgtcgaagagaatcccggtccgatggccctcccagtaactgccctccttttgcccctcgcactccttcttcatgccgctcgccccaactgggtcaacgtgattagcgatttgaagaaaatcgaggaccttatacagtctatgcatattgacgctacactgtatactgagagtgatgtacacccgtcctgtaaggtaacggccatgaaatgctttcttctggagctccaggtcatcagcttggagtctggggacgcaagcatccacgatacggttgaaaacctcatcatccttgcgaacaactctctctcatctaatggaaacgttacagagagtgggtgtaaggagtgcgaagagttggaagaaaaaaacatcaaagaatttcttcaatccttcgttcacatagtgcaaatgttcattaacacgtccactaccacacccgccccgaggccacctacgccggcaccgactatcgccagtcaacccctctctctgcgccccgaggcttgccggcctgcggctggtggggcggtccacacccggggcctggattttgcgtgcgatatatacatctgggcacctcttgccggcacctgcggagtgctgcttctctcactcgttattacgctgtactgctaa

SEQ ID NO: 340 - DNA, 2172 bp, synthetic construct
  source 1..2172: mol_type = other DNA
atggccttaccagtgaccgccttgctcctgccgctggccttgctgctccacgccgccaggccggactacaaagacgatgacgataaaggcggtggtggctctggtggtggcggatcccaggtgcagctggtgcagtctggggctgaggtgaagaagcctggggcctcagtgaaggtttcctgcaaggcatctggatacaccttcaccgcctactatctgcactgggtgcgacaggcccctggacaagggcttgagtggatgggaatgatcaaccccaacaatggtggcacaatttacgcacagacattccagggcagagtcaccatgaccagggacacgtccacgagcacagtctacatggagctgagcagcctgagatctgaggacacggccgtgtattactgtgctagagacctgggcggctacgtcctgtttgactactggggccaagggaccctggtcaccgtctcctcaggtggaggcggttcaggcggaggtggctctggcggtggcggatcggacatccagatgacccagtctccatcctccctgtctgcatctgtaggagacagagtcaccatcacttgccgggcaagtcagagcattagcagctatttaaattggtatcagcagaaaccagggaaagcccctaagctcctgatctatgatgcatccaacttggaaaccggggtcccatcaaggttcagtggcagtggatctgggacagatttcactctcaccatcagcagtctgcaacctgaagattttgcaacttactactgtcaacagagtcacagtgcgcctatcaccttcggccaagggacacgactggagattaaaaccacgacgccagcgccgcggccaccaacaccggcgcccaccatcgcgtcgcagcccctgtccctgcgcccagaggcgtgccggccagcggcggggggcgcagtgcacacgagggggctggacttcgcctgtgatatctacatctgggcgcccttggccgggacttgtggggtccttctcctgtcactggttatcaccctttactgccggagggaccagaggctgccccccgatgcccacaagccccctgggggaggcagtttccggacccccatccaagaggagcaggccgacgcccactccaccctggccaagatcagagtgaagttcagcaggagcgcagacgcccccgcgtaccagcagggccagaaccagctctataacgagctcaatctaggacgaagagaggagtacgatgttttggacaagagacgtggccgggaccctgagatggggggaaagccgagaaggaagaaccctcaggaaggcctgtacaatgaactgcagaaagataagatggcggaggcctacagtgagattgggatgaaaggcgagcgccggaggggcaaggggcacgatggcctttaccagggtctcagtacagccaccaaggacacctacgacgcccttcacatgcaggccctgccccctcgcggctctggcgagggaaggggttccctgcttacttgcggcgacgtcgaagagaatcccggtccgatggccctcccagtaactgccctccttttgcccctcgcactccttcttcatgccgctcgccccaactgggtcaacgtgattagcgatttgaagaaaatcgaggaccttatacagtctatgcatattgacgctacactgtatactgagagtgatgtacacccgtcctgtaaggtaacggccatgaaatgctttcttctggagctccaggtcatcagcttggagtctggggacgcaagcatccacgatacggttgaaaacctcatcatccttgcgaacaactctctctcatctaatggaaacgttacagagagtgggtgtaaggagtgcgaagagttggaagaaaaaaacatcaaagaatttcttcaatccttcgttcacatagtgcaaatgttcattaacacgtccactaccacacccgccccgaggccacctacgccggcaccgactatcgccagtcaacccctctctctgcgccccgaggcttgccggcctgcggctggtggggcggtccacacccggggcctggattttgcgtgcgatatatacatctgggcacctcttgccggcacctgcggagtgctgcttctctcactcgttattacgctgtactgctaa

SEQ ID NO: 341 - DNA, 2172 bp, synthetic construct
  source 1..2172: mol_type = other DNA
atggccttaccagtgaccgccttgctcctgccgctggccttgctgctccacgccgccaggccggactacaaagacgatgacgataaaggcggtggtggctctggtggtggcggatcccaggtgcagctggtgcagtctggggctgaggtgaagaagcctggggcctcagtgaaggtttcctgcaaggcatctggatacaccttcaccgactactatattcactgggtgcgacaggcccctggacaagggcttgagtggatgggaatgatcaaccctagaggaggtagcacaacttacgcacagtcattccagggcagagtcaccatgaccagggacacgtccacgagcacagtctacatggagctgagcagcctgagatctgaggacacggccgtgtattactgtgctagagatttaggtgactatggggactacgactactggggccaagggaccctggtcaccgtctcctcaggtggaggcggttcaggcggaggtggctctggcggtggcggatcggacatccagatgacccagtctccatcctccctgtctgcatctgtaggagacagagtcaccatcacttgccgggcaagtcagagcattagcacaaacttagcttggtatcagcagaaaccagggaaagcccctaagctcctgatctatgatgcatcctatttggaggctggggtcccatcaaggttcagtggcagtggatctgggacagatttcactctcaccatcagcagtctgcaacctgaagattttgcaacttactactgtcaacagagttacagtacccctccgacttttggccaggggaccaagctggagatcaaaaccacgacgccagcgccgcggccaccaacaccggcgcccaccatcgcgtcgcagcccctgtccctgcgcccagaggcgtgccggccagcggcggggggcgcagtgcacacgagggggctggacttcgcctgtgatatctacatctgggcgcccttggccgggacttgtggggtccttctcctgtcactggttatcaccctttactgccggagggaccagaggctgccccccgatgcccacaagccccctgggggaggcagtttccggacccccatccaagaggagcaggccgacgcccactccaccctggccaagatcagagtgaagttcagcaggagcgcagacgcccccgcgtaccagcagggccagaaccagctctataacgagctcaatctaggacgaagagaggagtacgatgttttggacaagagacgtggccgggaccctgagatggggggaaagccgagaaggaagaaccctcaggaaggcctgtacaatgaactgcagaaagataagatggcggaggcctacagtgagattgggatgaaaggcgagcgccggaggggcaaggggcacgatggcctttaccagggtctcagtacagccaccaaggacacctacgacgcccttcacatgcaggccctgccccctcgcggctctggcgagggaaggggttccctgcttacttgcggcgacgtcgaagagaatcccggtccgatggccctcccagtaactgccctccttttgcccctcgcactccttcttcatgccgctcgccccaactgggtcaacgtgattagcgatttgaagaaaatcgaggaccttatacagtctatgcatattgacgctacactgtatactgagagtgatgtacacccgtcctgtaaggtaacggccatgaaatgctttcttctggagctccaggtcatcagcttggagtctggggacgcaagcatccacgatacggttgaaaacctcatcatccttgcgaacaactctctctcatctaatggaaacgttacagagagtgggtgtaaggagtgcgaagagttggaagaaaaaaacatcaaagaatttcttcaatccttcgttcacatagtgcaaatgttcattaacacgtccactaccacacccgccccgaggccacctacgccggcaccgactatcgccagtcaacccctctctctgcgccccgaggcttgccggcctgcggctggtggggcggtccacacccggggcctggattttgcgtgcgatatatacatctgggcacctcttgccggcacctgcggagtgctgcttctctcactcgttattacgctgtactgctaa

SEQ ID NO: 342 - DNA, 2205 bp, synthetic construct
  source 1..2205: mol_type = other DNA
atggccttaccagtgaccgccttgctcctgccgctggccttgctgctccacgccgccaggccggactacaaagacgatgacgataaaggcggtggtggctctggtggtggcggatccgaggtgcagctgttggagtctgggggaggcttggtacagcctggggggtccctgagactctcctgtgcagcctctggattcacctttagcaattcagatatgaattgggtccgccaggctccagggaaggggctggagtgggtctcagctattagtggtggaggtgacacactctactacgcagactccgtgaagggccggttcaccatctccagagacaattccaagaacacgctgtatctgcaaatgaacagcctgagagccgaggacacggccgtatattactgtgcgatggccagcgctttggacagtagcggtgacaatgaggcttttgatatctggggccaagggacaacagtcaccgtctcttcaggtggaggcggttcaggcggaggtggctctggcggtggcggatcggacatcgtgatgacccagtctccagactccctggctgtgtctctgggcgagagggccaccatcaactgcaagtccagccagagtgttttatattccagtaataacaagaactacttagcttggtaccagcagaaaccaggacagcctcctaagctgctcatttactgggcatctacccgggattccggggtccctgaccgattcagtggcagcgggtctgggacagatttcactctcaccatcagcagcctgcaggctgaagatgtggcagtttattactgtcagcaatattatggcttccctcccaccttcggccaagggacacgactggagattaaaaccacgacgccagcgccgcggccaccaacaccggcgcccaccatcgcgtcgcagcccctgtccctgcgcccagaggcgtgccggccagcggcggggggcgcagtgcacacgagggggctggacttcgcctgtgatatctacatctgggcgcccttggccgggacttgtggggtccttctcctgtcactggttatcaccctttactgccggagggaccagaggctgccccccgatgcccacaagccccctgggggaggcagtttccggacccccatccaagaggagcaggccgacgcccactccaccctggccaagatcagagtgaagttcagcaggagcgcagacgcccccgcgtaccagcagggccagaaccagctctataacgagctcaatctaggacgaagagaggagtacgatgttttggacaagagacgtggccgggaccctgagatggggggaaagccgagaaggaagaaccctcaggaaggcctgtacaatgaactgcagaaagataagatggcggaggcctacagtgagattgggatgaaaggcgagcgccggaggggcaaggggcacgatggcctttaccagggtctcagtacagccaccaaggacacctacgacgcccttcacatgcaggccctgccccctcgcggctctggcgagggaaggggttccctgcttacttgcggcgacgtcgaagagaatcccggtccgatggccctcccagtaactgccctccttttgcccctcgcactccttcttcatgccgctcgccccaactgggtcaacgtgattagcgatttgaagaaaatcgaggaccttatacagtctatgcatattgacgctacactgtatactgagagtgatgtacacccgtcctgtaaggtaacggccatgaaatgctttcttctggagctccaggtcatcagcttggagtctggggacgcaagcatccacgatacggttgaaaacctcatcatccttgcgaacaactctctctcatctaatggaaacgttacagagagtgggtgtaaggagtgcgaagagttggaagaaaaaaacatcaaagaatttcttcaatccttcgttcacatagtgcaaatgttcattaacacgtccactaccacacccgccccgaggccacctacgccggcaccgactatcgccagtcaacccctctctctgcgccccgaggcttgccggcctgcggctggtggggcggtccacacccggggcctggattttgcgtgcgatatatacatctgggcacctcttgccggcacctgcggagtgctgcttctctcactcgttattacgctgtactgctaa

SEQ ID NO: 343 - DNA, 2181 bp, synthetic construct
  source 1..2181: mol_type = other DNA
atggccttaccagtgaccgccttgctcctgccgctggccttgctgctccacgccgccaggccggactacaaagacgatgacgataaaggcggtggtggctctggtggtggcggatcccaggtgcagctggtgcagtctggggctgaggtgaagaagcctggggcctcagtgaaggtttcctgcaaggcatctggatacaccttcaccagctactatatgcactgggtgcgacaggcccctggacaagggcttgagtggatgggatggatcaacccaaataacggtggtacaagctacgcacagaagttccagggcagagtcaccatgaccagggacacgtccacgagcacagtctacatggagctgagcagcctgagatctgaggacacggccgtgtattactgtgctagagtggaggacgatttctggagcggccctagctttgactactggggccaagggaccctggtcaccgtctcctcaggtggaggcggttcaggcggaggtggctctggcggtggcggatcggacatccagatgacccagtctccatcctccctgtctgcatctgtaggagacagagtcaccatcacttgccaagcaagtcacgacattagcaaattcttaaattggtatcagcagaaaccagggaaagcccctaagctcctgatctatgatgcatccaatttgcaacgaggggtcccatcaaggttcagtggcagtggatctgggacagatttcactctcaccatcagcagtctgcaacctgaagattttgcaacttactactgtcaacagacctacagtttccctttcacttttggccaggggaccaagctggagatcaaaaccacgacgccagcgccgcggccaccaacaccggcgcccaccatcgcgtcgcagcccctgtccctgcgcccagaggcgtgccggccagcggcggggggcgcagtgcacacgagggggctggacttcgcctgtgatatctacatctgggcgcccttggccgggacttgtggggtccttctcctgtcactggttatcaccctttactgccggagggaccagaggctgccccccgatgcccacaagccccctgggggaggcagtttccggacccccatccaagaggagcaggccgacgcccactccaccctggccaagatcagagtgaagttcagcaggagcgcagacgcccccgcgtaccagcagggccagaaccagctctataacgagctcaatctaggacgaagagaggagtacgatgttttggacaagagacgtggccgggaccctgagatggggggaaagccgagaaggaagaaccctcaggaaggcctgtacaatgaactgcagaaagataagatggcggaggcctacagtgagattgggatgaaaggcgagcgccggaggggcaaggggcacgatggcctttaccagggtctcagtacagccaccaaggacacctacgacgcccttcacatgcaggccctgccccctcgcggctctggcgagggaaggggttccctgcttacttgcggcgacgtcgaagagaatcccggtccgatggccctcccagtaactgccctccttttgcccctcgcactccttcttcatgccgctcgccccaactgggtcaacgtgattagcgatttgaagaaaatcgaggaccttatacagtctatgcatattgacgctacactgtatactgagagtgatgtacacccgtcctgtaaggtaacggccatgaaatgctttcttctggagctccaggtcatcagcttggagtctggggacgcaagcatccacgatacggttgaaaacctcatcatccttgcgaacaactctctctcatctaatggaaacgttacagagagtgggtgtaaggagtgcgaagagttggaagaaaaaaacatcaaagaatttcttcaatccttcgttcacatagtgcaaatgttcattaacacgtccactaccacacccgccccgaggccacctacgccggcaccgactatcgccagtcaacccctctctctgcgccccgaggcttgccggcctgcggctggtggggcggtccacacccggggcctggattttgcgtgcgatatatacatctgggcacctcttgccggcacctgcggagtgctgcttctctcactcgttattacgctgtactgctaa

SEQ ID NO: 344 - DNA, 2187 bp, synthetic construct
  source 1..2187: mol_type = other DNA
atggccttaccagtgaccgccttgctcctgccgctggccttgctgctccacgccgccaggccggactacaaagacgatgacgataaaggcggtggtggctctggtggtggcggatcccaggtgcagctggtgcagtctggggctgaggtgaagaagcctgggtcctcggtgaaggtctcctgcaaggcttctggaggcaccttcaccaattatgctttcagctgggtgcgacaggcccctggacaagggcttgagtggatgggaggtatcatccctatcagcggtgccgcaaactacgcacagaagttccagggcagagtcacgattaccgcggacgaatccacgagcacagcctacatggagctgagcagcctgagatctgaggacacggccgtgtattactgtgcgagagggtccggactggacgatgcttttgatatctggggccaagggacaatggtcaccgtctcttcaggtggaggcggttcaggcggaggtggctctggcggtggcggatcggatattgtgatgactcagtctccactctccctgcccgtcacccctggagagccggcctccatctcctgcaggtctagtcagagcctcctccattcaaacgggtacaactatttggattggtacctgcagaagccagggcagtctccacagctcctgatctatgatgcctcttcccttcagtccggggtccctgacaggttcagtggcagtggatcaggcacagattttacactgaaaatcagcagagtggaggctgaggatgttggggtttattactgcatgcaagctcggcaaactcctctgaccttcggccaagggacacgactggagattaaaaccacgacgccagcgccgcggccaccaacaccggcgcccaccatcgcgtcgcagcccctgtccctgcgcccagaggcgtgccggccagcggcggggggcgcagtgcacacgagggggctggacttcgcctgtgatatctacatctgggcgcccttggccgggacttgtggggtccttctcctgtcactggttatcaccctttactgccggagggaccagaggctgccccccgatgcccacaagccccctgggggaggcagtttccggacccccatccaagaggagcaggccgacgcccactccaccctggccaagatcagagtgaagttcagcaggagcgcagacgcccccgcgtaccagcagggccagaaccagctctataacgagctcaatctaggacgaagagaggagtacgatgttttggacaagagacgtggccgggaccctgagatggggggaaagccgagaaggaagaaccctcaggaaggcctgtacaatgaactgcagaaagataagatggcggaggcctacagtgagattgggatgaaaggcgagcgccggaggggcaaggggcacgatggcctttaccagggtctcagtacagccaccaaggacacctacgacgcccttcacatgcaggccctgccccctcgcggctctggcgagggaaggggttccctgcttacttgcggcgacgtcgaagagaatcccggtccgatggccctcccagtaactgccctccttttgcccctcgcactccttcttcatgccgctcgccccaactgggtcaacgtgattagcgatttgaagaaaatcgaggaccttatacagtctatgcatattgacgctacactgtatactgagagtgatgtacacccgtcctgtaaggtaacggccatgaaatgctttcttctggagctccaggtcatcagcttggagtctggggacgcaagcatccacgatacggttgaaaacctcatcatccttgcgaacaactctctctcatctaatggaaacgttacagagagtgggtgtaaggagtgcgaagagttggaagaaaaaaacatcaaagaatttcttcaatccttcgttcacatagtgcaaatgttcattaacacgtccactaccacacccgccccgaggccacctacgccggcaccgactatcgccagtcaacccctctctctgcgccccgaggcttgccggcctgcggctggtggggcggtccacacccggggcctggattttgcgtgcgatatatacatctgggcacctcttgccggcacctgcggagtgctgcttctctcactcgttattacgctgtactgctaa

SEQ ID NO: 345 - DNA, 2217 bp, synthetic construct
  source 1..2217: mol_type = other DNA
atggccttaccagtgaccgccttgctcctgccgctggccttgctgctccacgccgccaggccggactacaaagacgatgacgataaaggcggtggtggctctggtggtggcggatcccaggtgcagctggtgcagtctggggctgaggtgaagaagcctggggcctcagtgaaggtttcctgcaaggcatctggatacaccttcaccgcgtactatatgcactgggtgcgacaggcccctggacaagggcttgagtggatgggatggatgaaccccaatagtggtaacacaggatacgcacagaagttccagggcagagtcaccatgaccagggacacgtccacgagcacagtctacatggagctgagcagcctgagatctgaggacacggccgtgtattactgtgctagagagggcagaatcgattacggggactacgacgactactactattactacggtatggacgtgtggggccaagggaccactgtcaccgtctcctcaggtggaggcggttcaggcggaggtggctctggcggtggcggatcggatattgtgatgactcagtctccactctccctgcccgtcacccctggagagccggcctccatctcctgcaggtctagtcagagcctcctgcattcaaatggttacaactatttggattggtacctgcagaagccagggcagtctccacagctcctgatctatgctgcttctaatttacagggtggggtccctgacaggttcagtggcagtggatcaggcacagattttacactgaaaatcagcagagtggaggctgaggatgttggggtttattactgcatgcaaacactagagtcccctgtaactttcggcggagggaccaaggtggagatcaaaaccacgacgccagcgccgcggccaccaacaccggcgcccaccatcgcgtcgcagcccctgtccctgcgcccagaggcgtgccggccagcggcggggggcgcagtgcacacgagggggctggacttcgcctgtgatatctacatctgggcgcccttggccgggacttgtggggtccttctcctgtcactggttatcaccctttactgccggagggaccagaggctgccccccgatgcccacaagccccctgggggaggcagtttccggacccccatccaagaggagcaggccgacgcccactccaccctggccaagatcagagtgaagttcagcaggagcgcagacgcccccgcgtaccagcagggccagaaccagctctataacgagctcaatctaggacgaagagaggagtacgatgttttggacaagagacgtggccgggaccctgagatggggggaaagccgagaaggaagaaccctcaggaaggcctgtacaatgaactgcagaaagataagatggcggaggcctacagtgagattgggatgaaaggcgagcgccggaggggcaaggggcacgatggcctttaccagggtctcagtacagccaccaaggacacctacgacgcccttcacatgcaggccctgccccctcgcggctctggcgagggaaggggttccctgcttacttgcggcgacgtcgaagagaatcccggtccgatggccctcccagtaactgccctccttttgcccctcgcactccttcttcatgccgctcgccccaactgggtcaacgtgattagcgatttgaagaaaatcgaggaccttatacagtctatgcatattgacgctacactgtatactgagagtgatgtacacccgtcctgtaaggtaacggccatgaaatgctttcttctggagctccaggtcatcagcttggagtctggggacgcaagcatccacgatacggttgaaaacctcatcatccttgcgaacaactctctctcatctaatggaaacgttacagagagtgggtgtaaggagtgcgaagagttggaagaaaaaaacatcaaagaatttcttcaatccttcgttcacatagtgcaaatgttcattaacacgtccactaccacacccgccccgaggccacctacgccggcaccgactatcgccagtcaacccctctctctgcgccccgaggcttgccggcctgcggctggtggggcggtccacacccggggcctggattttgcgtgcgatatatacatctgggcacctcttgccggcacctgcggagtgctgcttctctcactcgttattacgctgtactgctaa

SEQ ID NO: 346 - DNA, 2175 bp, synthetic construct
  source 1..2175: mol_type = other DNA
atggccttaccagtgaccgccttgctcctgccgctggccttgctgctccacgccgccaggccggactacaaagacgatgacgataaaggcggtggtggctctggtggtggcggatcccaggtgcagctggtgcagtctggggctgaggtgaagaagcctggggcctcagtgaaggtttcctgcaaggcatctggatacaccttcaccgattactatgtgcactgggtgcgacaggcccctggacaagggcttgagtggatgggaacgatcaaccctagtggtgggagcacaagctacgcacagaagttccagggcagagtcaccatgaccagggacacgtccacgagcacagtctacatggagctgagcagcctgagatctgaggacacggccgtgtattactgtgctagagaccagggactctggttcaccggttttgactactggggccaagggaccctggtcaccgtctcctcaggtggaggcggttcaggcggaggtggctctggcggtggcggatcggacatccagatgacccagtctccatcctccctgtctgcatctgtaggagacagagtcaccatcacttgccgggcaagtcagggcattagcaacaatttaaattggtatcagcagaaaccagggaaagcccctaagctcctgatctatgatgcatccaacttggaacgtggggtcccatcaaggttcagtggcagtggatctgggacagatttcactctcaccatcagcagtctgcaacctgaagattttgcaacttactactgtcaacagagttacgacggtcctatcaccttcggccaagggacacgactggagattaaaaccacgacgccagcgccgcggccaccaacaccggcgcccaccatcgcgtcgcagcccctgtccctgcgcccagaggcgtgccggccagcggcggggggcgcagtgcacacgagggggctggacttcgcctgtgatatctacatctgggcgcccttggccgggacttgtggggtccttctcctgtcactggttatcaccctttactgccggagggaccagaggctgccccccgatgcccacaagccccctgggggaggcagtttccggacccccatccaagaggagcaggccgacgcccactccaccctggccaagatcagagtgaagttcagcaggagcgcagacgcccccgcgtaccagcagggccagaaccagctctataacgagctcaatctaggacgaagagaggagtacgatgttttggacaagagacgtggccgggaccctgagatggggggaaagccgagaaggaagaaccctcaggaaggcctgtacaatgaactgcagaaagataagatggcggaggcctacagtgagattgggatgaaaggcgagcgccggaggggcaaggggcacgatggcctttaccagggtctcagtacagccaccaaggacacctacgacgcccttcacatgcaggccctgccccctcgcggctctggcgagggaaggggttccctgcttacttgcggcgacgtcgaagagaatcccggtccgatggccctcccagtaactgccctccttttgcccctcgcactccttcttcatgccgctcgccccaactgggtcaacgtgattagcgatttgaagaaaatcgaggaccttatacagtctatgcatattgacgctacactgtatactgagagtgatgtacacccgtcctgtaaggtaacggccatgaaatgctttcttctggagctccaggtcatcagcttggagtctggggacgcaagcatccacgatacggttgaaaacctcatcatccttgcgaacaactctctctcatctaatggaaacgttacagagagtgggtgtaaggagtgcgaagagttggaagaaaaaaacatcaaagaatttcttcaatccttcgttcacatagtgcaaatgttcattaacacgtccactaccacacccgccccgaggccacctacgccggcaccgactatcgccagtcaacccctctctctgcgccccgaggcttgccggcctgcggctggtggggcggtccacacccggggcctggattttgcgtgcgatatatacatctgggcacctcttgccggcacctgcggagtgctgcttctctcactcgttattacgctgtactgctaa

SEQ ID NO: 347 - DNA, 2175 bp, synthetic construct
  source 1..2175: mol_type = other DNA
atggccttaccagtgaccgccttgctcctgccgctggccttgctgctccacgccgccaggccggactacaaagacgatgacgataaaggcggtggtggctctggtggtggcggatcccaggtgcagctggtgcagtctggggctgaggtgaagaagcctggggcctcagtgaaggtttcctgcaaggcatctggatacaccttcaccgcctaccacatgcactgggtgcgacaggcccctggacaagggcttgagtggatgggaataatcaaccctggagacggtgccacagggtacgcacagaatctccagggcagagtcaccatgaccagggacacgtccacgagcacagtctacatggagctgagcagcctgagatctgaggacacggccgtgtattactgtgctggtgagggcatttccggatcagatgcttttgatatctggggccaagggacattagtcaccgtctcttcaggtggaggcggttcaggcggaggtggctctggcggtggcggatcggacatccagatgacccagtctccatcctccctgtctgcatctgtaggagacagagtcaccatcacttgccgggcaagtcagagcattagcagctggttagcttggtatcagcagaaaccagggaaagcccctaagctcctgatctatgctgcatccagtttgcaaagtggggtcccatcaaggttcagtggcagtggatctgggacagatttcactctcaccatcagcagtctgcaacctgaagattttgcaacttactactgtttgcaggactacagttatcctctcactttcggcggagggaccaaggtggagatcaaaaccacgacgccagcgccgcggccaccaacaccggcgcccaccatcgcgtcgcagcccctgtccctgcgcccagaggcgtgccggccagcggcggggggcgcagtgcacacgagggggctggacttcgcctgtgatatctacatctgggcgcccttggccgggacttgtggggtccttctcctgtcactggttatcaccctttactgccggagggaccagaggctgccccccgatgcccacaagccccctgggggaggcagtttccggacccccatccaagaggagcaggccgacgcccactccaccctggccaagatcagagtgaagttcagcaggagcgcagacgcccccgcgtaccagcagggccagaaccagctctataacgagctcaatctaggacgaagagaggagtacgatgttttggacaagagacgtggccgggaccctgagatggggggaaagccgagaaggaagaaccctcaggaaggcctgtacaatgaactgcagaaagataagatggcggaggcctacagtgagattgggatgaaaggcgagcgccggaggggcaaggggcacgatggcctttaccagggtctcagtacagccaccaaggacacctacgacgcccttcacatgcaggccctgccccctcgcggctctggcgagggaaggggttccctgcttacttgcggcgacgtcgaagagaatcccggtccgatggccctcccagtaactgccctccttttgcccctcgcactccttcttcatgccgctcgccccaactgggtcaacgtgattagcgatttgaagaaaatcgaggaccttatacagtctatgcatattgacgctacactgtatactgagagtgatgtacacccgtcctgtaaggtaacggccatgaaatgctttcttctggagctccaggtcatcagcttggagtctggggacgcaagcatccacgatacggttgaaaacctcatcatccttgcgaacaactctctctcatctaatggaaacgttacagagagtgggtgtaaggagtgcgaagagttggaagaaaaaaacatcaaagaatttcttcaatccttcgttcacatagtgcaaatgttcattaacacgtccactaccacacccgccccgaggccacctacgccggcaccgactatcgccagtcaacccctctctctgcgccccgaggcttgccggcctgcggctggtggggcggtccacacccggggcctggattttgcgtgcgatatatacatctgggcacctcttgccggcacctgcggagtgctgcttctctcactcgttattacgctgtactgctaa

SEQ ID NO: 348 - DNA, 2169 bp, synthetic construct
  source 1..2169: mol_type = other DNA
atggccttaccagtgaccgccttgctcctgccgctggccttgctgctccacgccgccaggccggactacaaagacgatgacgataaaggcggtggtggctctggtggtggcggatcccaggtgcagctggtgcagtctggggctgaggtgaagaagcctgggtcctcggtgaaggtctcctgcaaggcttctggaggcaccttcagcagctatgctatcagctgggtgcgacaggcccctggacaagggcttgagtggatgggatggatgaatcctaactctggtaacacaggttacgcacagaagttccagggcagagtcacgattaccgcggacgaatccacgagcacagcctacatggagctgagcagcctgagatctgaggacacggccgtgtattactgtgcgtggggagtcgatccgtactactttgactactggggccaagggaccctggtcaccgtctcctcaggtggaggcggttcaggcggaggtggctctggcggtggcggatcggacatccagatgacccagtctccatcctccctgtctgcatctgtaggagacagagtcaccatcacttgccgggcaagtcagagcattaacaggtggttagcgtggtatcagcagaaaccagggaaagcccctaagctcctgatctatgacgcatccaatttggagaccggggtcccatcaaggttcagtggcagtggatctgggacagatttcactctcaccatcagcagtctgcaacctgaagattttgcaacttactactgtcaacagagttacattacccctctcactttcggcggagggaccaaggtggagatcaaaaccacgacgccagcgccgcggccaccaacaccggcgcccaccatcgcgtcgcagcccctgtccctgcgcccagaggcgtgccggccagcggcggggggcgcagtgcacacgagggggctggacttcgcctgtgatatctacatctgggcgcccttggccgggacttgtggggtccttctcctgtcactggttatcaccctttactgccggagggaccagaggctgccccccgatgcccacaagccccctgggggaggcagtttccggacccccatccaagaggagcaggccgacgcccactccaccctggccaagatcagagtgaagttcagcaggagcgcagacgcccccgcgtaccagcagggccagaaccagctctataacgagctcaatctaggacgaagagaggagtacgatgttttggacaagagacgtggccgggaccctgagatggggggaaagccgagaaggaagaaccctcaggaaggcctgtacaatgaactgcagaaagataagatggcggaggcctacagtgagattgggatgaaaggcgagcgccggaggggcaaggggcacgatggcctttaccagggtctcagtacagccaccaaggacacctacgacgcccttcacatgcaggccctgccccctcgcggctctggcgagggaaggggttccctgcttacttgcggcgacgtcgaagagaatcccggtccgatggccctcccagtaactgccctccttttgcccctcgcactccttcttcatgccgctcgccccaactgggtcaacgtgattagcgatttgaagaaaatcgaggaccttatacagtctatgcatattgacgctacactgtatactgagagtgatgtacacccgtcctgtaaggtaacggccatgaaatgctttcttctggagctccaggtcatcagcttggagtctggggacgcaagcatccacgatacggttgaaaacctcatcatccttgcgaacaactctctctcatctaatggaaacgttacagagagtgggtgtaaggagtgcgaagagttggaagaaaaaaacatcaaagaatttcttcaatccttcgttcacatagtgcaaatgttcattaacacgtccactaccacacccgccccgaggccacctacgccggcaccgactatcgccagtcaacccctctctctgcgccccgaggcttgccggcctgcggctggtggggcggtccacacccggggcctggattttgcgtgcgatatatacatctgggcacctcttgccggcacctgcggagtgctgcttctctcactcgttattacgctgtactgctaa

SEQ ID NO: 349 - DNA, 2169 bp, synthetic construct
  source 1..2169: mol_type = other DNA
atggccttaccagtgaccgccttgctcctgccgctggccttgctgctccacgccgccaggccggactacaaagacgatgacgataaaggcggtggtggctctggtggtggcggatcccaggtgcagctggtgcagtctggggctgaggtgaagaagcctggggcctcagtgaaggtttcctgcaaggcatctggatacaccttcaccagctactatatgcactgggtgcgacaggcccctggacaagggcttgagtggatgggaatattcaacccctccgatggtagcacaagctacgcacagaagttccagggcagagtcaccatgaccagggacacgtccacgagcacagtctacatggagctgagcagcctgagatctgaggacacggccgtgtattactgtgctagagatgttggtgagaccacgttcgacccctggggccagggaaccctggtcaccgtctcctcaggtggaggcggttcaggcggaggtggctctggcggtggcggatcggacatccagatgacccagtctccatcctccctgtctgcatctgtaggagacagagtcaccatcacttgccaggcaagtcaggatattagcaactatttaaattggtatcagcagaaaccagggaaagcccctaagctcctgatctatgacgcatccagtttggaaagtggggtcccatcaaggttcagtggcagtggatctgggacagatttcactctcaccatcagcagtctgcaacctgaagattttgcaacttactactgtcaacagactaatagttttcctatcaccttcggccaagggacacgactggagattaaaaccacgacgccagcgccgcggccaccaacaccggcgcccaccatcgcgtcgcagcccctgtccctgcgcccagaggcgtgccggccagcggcggggggcgcagtgcacacgagggggctggacttcgcctgtgatatctacatctgggcgcccttggccgggacttgtggggtccttctcctgtcactggttatcaccctttactgccggagggaccagaggctgccccccgatgcccacaagccccctgggggaggcagtttccggacccccatccaagaggagcaggccgacgcccactccaccctggccaagatcagagtgaagttcagcaggagcgcagacgcccccgcgtaccagcagggccagaaccagctctataacgagctcaatctaggacgaagagaggagtacgatgttttggacaagagacgtggccgggaccctgagatggggggaaagccgagaaggaagaaccctcaggaaggcctgtacaatgaactgcagaaagataagatggcggaggcctacagtgagattgggatgaaaggcgagcgccggaggggcaaggggcacgatggcctttaccagggtctcagtacagccaccaaggacacctacgacgcccttcacatgcaggccctgccccctcgcggctctggcgagggaaggggttccctgcttacttgcggcgacgtcgaagagaatcccggtccgatggccctcccagtaactgccctccttttgcccctcgcactccttcttcatgccgctcgccccaactgggtcaacgtgattagcgatttgaagaaaatcgaggaccttatacagtctatgcatattgacgctacactgtatactgagagtgatgtacacccgtcctgtaaggtaacggccatgaaatgctttcttctggagctccaggtcatcagcttggagtctggggacgcaagcatccacgatacggttgaaaacctcatcatccttgcgaacaactctctctcatctaatggaaacgttacagagagtgggtgtaaggagtgcgaagagttggaagaaaaaaacatcaaagaatttcttcaatccttcgttcacatagtgcaaatgttcattaacacgtccactaccacacccgccccgaggccacctacgccggcaccgactatcgccagtcaacccctctctctgcgccccgaggcttgccggcctgcggctggtggggcggtccacacccggggcctggattttgcgtgcgatatatacatctgggcacctcttgccggcacctgcggagtgctgcttctctcactcgttattacgctgtactgctaa

SEQ ID NO: 350 - DNA, 2184 bp, synthetic construct
  source 1..2184: mol_type = other DNA
atggccttaccagtgaccgccttgctcctgccgctggccttgctgctccacgccgccaggccggactacaaagacgatgacgataaaggcggtggtggctctggtggtggcggatcccaggtgcagctcgttcaaagcggcgccgaggtcaagaaaccaggcgctagcgttaaagttagttgtaaagcctccggctatactttcacatcttacggcatttcttgggtacggcaggcaccggggcagggtttggaatggatggggtggatttccgcctataacggccacacaaattacgcgcagaaattccaggggcgcgttacgatgacacgcgatacctctacctctaccgtttatatggaacttagtagtcttcgttcggaggataccgctgtctactattgcgcacgtgacagtgtacggggttgggactactactacggcatgggggtctggggccaagggaccactgtcaccgtctcctcaggtggaggcggttcaggcggaggtggctctggcggtggcggatcggacatccagatgacccagtctccatcctccctgtctgcatctgtaggagacagagtcaccatcacttgccaggcaagtcaggacattagaaacttcttaaattggtatcagcagaaaccagggaaagcccctaagctcctgatctatgctgcatccacgttgcaaagtggggtcccatcaaggttcagtggcagtggatctgggacagatttcactctcaccatcagcagtctgcaacctgaagattttgcaacttactactgtcaacagagttacagtgcccctagcacttttggccaggggaccaagctggagatcaaaaccacgacgccagcgccgcggccaccaacaccggcgcccaccatcgcgtcgcagcccctgtccctgcgcccagaggcgtgccggccagcggcggggggcgcagtgcacacgagggggctggacttcgcctgtgatatctacatctgggcgcccttggccgggacttgtggggtccttctcctgtcactggttatcaccctttactgccggagggaccagaggctgccccccgatgcccacaagccccctgggggaggcagtttccggacccccatccaagaggagcaggccgacgcccactccaccctggccaagatcagagtgaagttcagcaggagcgcagacgcccccgcgtaccagcagggccagaaccagctctataacgagctcaatctaggacgaagagaggagtacgatgttttggacaagagacgtggccgggaccctgagatggggggaaagccgagaaggaagaaccctcaggaaggcctgtacaatgaactgcagaaagataagatggcggaggcctacagtgagattgggatgaaaggcgagcgccggaggggcaaggggcacgatggcctttaccagggtctcagtacagccaccaaggacacctacgacgcccttcacatgcaggccctgccccctcgcggctctggcgagggaaggggttccctgcttacttgcggcgacgtcgaagagaatcccggtccgatggccctcccagtaactgccctccttttgcccctcgcactccttcttcatgccgctcgccccaactgggtcaacgtgattagcgatttgaagaaaatcgaggaccttatacagtctatgcatattgacgctacactgtatactgagagtgatgtacacccgtcctgtaaggtaacggccatgaaatgctttcttctggagctccaggtcatcagcttggagtctggggacgcaagcatccacgatacggttgaaaacctcatcatccttgcgaacaactctctctcatctaatggaaacgttacagagagtgggtgtaaggagtgcgaagagttggaagaaaaaaacatcaaagaatttcttcaatccttcgttcacatagtgcaaatgttcattaacacgtccactaccacacccgccccgaggccacctacgccggcaccgactatcgccagtcaacccctctctctgcgccccgaggcttgccggcctgcggctggtggggcggtccacacccggggcctggattttgcgtgcgatatatacatctgggcacctcttgccggcacctgcggagtgctgcttctctcactcgttattacgctgtactgctaa

SEQ ID NO: 351 - DNA, 2175 bp, synthetic construct
  source 1..2175: mol_type = other DNA
atggccttaccagtgaccgccttgctcctgccgctggccttgctgctccacgccgccaggccggactacaaagacgatgacgataaaggcggtggtggctctggtggtggcggatcccaggtgcagctggtgcagtctggggctgaggtgaagaagcctgggtcttcagtgaaggtttcctgcaaggcatctggatacaccttcatcgactactatatgcactgggtgcgacaggcccctggacaagggcttgagtggatgggatggatgaaccctcacagtggtaacagtgataatgcaccgaagttccagggcagagtcaccatcaccgcagacgagtccacgagcacagcatacatggagctgagcagcctgagatctgaggacacggccgtgtattactgtgctagaggttactccggatacgatctgacggctgactactggggccaagggaccctggtcaccgtctcctcaggtggaggcggttcaggcggaggtggctctggcggtggcggatcggacatccagatgacccagtctccatcctccctgtctgcatctgtaggagacagagtcaccatcacttgccgggcaagtcagagcattagcaattatttaaattggtatcagcagaaaccagggaaagcccctaagctcctgatctatgacgcatccaacttggagaccggggtcccatcaaggttcagtggcagtggatctgggacagatttcactctcaccatcagcagtctgcaacctgaagattttgcaacttactactgtcaacagagttacagtacccctatcaccttcggccaagggacacgactggagattaaaaccacgacgccagcgccgcggccaccaacaccggcgcccaccatcgcgtcgcagcccctgtccctgcgcccagaggcgtgccggccagcggcggggggcgcagtgcacacgagggggctggacttcgcctgtgatatctacatctgggcgcccttggccgggacttgtggggtccttctcctgtcactggttatcaccctttactgccggagggaccagaggctgccccccgatgcccacaagccccctgggggaggcagtttccggacccccatccaagaggagcaggccgacgcccactccaccctggccaagatcagagtgaagttcagcaggagcgcagacgcccccgcgtaccagcagggccagaaccagctctataacgagctcaatctaggacgaagagaggagtacgatgttttggacaagagacgtggccgggaccctgagatggggggaaagccgagaaggaagaaccctcaggaaggcctgtacaatgaactgcagaaagataagatggcggaggcctacagtgagattgggatgaaaggcgagcgccggaggggcaaggggcacgatggcctttaccagggtctcagtacagccaccaaggacacctacgacgcccttcacatgcaggccctgccccctcgcggctctggcgagggaaggggttccctgcttacttgcggcgacgtcgaagagaatcccggtccgatggccctcccagtaactgccctccttttgcccctcgcactccttcttcatgccgctcgccccaactgggtcaacgtgattagcgatttgaagaaaatcgaggaccttatacagtctatgcatattgacgctacactgtatactgagagtgatgtacacccgtcctgtaaggtaacggccatgaaatgctttcttctggagctccaggtcatcagcttggagtctggggacgcaagcatccacgatacggttgaaaacctcatcatccttgcgaacaactctctctcatctaatggaaacgttacagagagtgggtgtaaggagtgcgaagagttggaagaaaaaaacatcaaagaatttcttcaatccttcgttcacatagtgcaaatgttcattaacacgtccactaccacacccgccccgaggccacctacgccggcaccgactatcgccagtcaacccctctctctgcgccccgaggcttgccggcctgcggctggtggggcggtccacacccggggcctggattttgcgtgcgatatatacatctgggcacctcttgccggcacctgcggagtgctgcttctctcactcgttattacgctgtactgctaa

SEQ ID NO: 352 - DNA, 2202 bp, synthetic construct
  source 1..2202: mol_type = other DNA
atggccttaccagtgaccgccttgctcctgccgctggccttgctgctccacgccgccaggccggactacaaagacgatgacgataaaggcggtggtggctctggtggtggcggatcccaggtgcagctggtgcagtctggggctgaggtgaagaagcctggggcctcagtgaaggtctcctgcaaggcttctggatacaccttcaccggccagtatatgcactgggtgcgacaggcccctggacaagggcttgagtggatgggatggatcaacccgaacactggtgacacaaactatgcacagaagtttcagggcagggtcaccatgaccagggacacgtccaccagcacagtatacatggagctgagcagcctgagatctgaagacacggccgtgtattactgtgcgagagacagcgttttcgaggttgaagggggtactgattattattattactacggtatggatgtctggggccaagggacaatggtcaccgtctcttcaggtggaggcggttcaggcggaggtggctctggcggtggcggatcggacatccagatgacccagtctccatcctccctgtctgcatctgtaggagacagagtcaccatcacttgccgggcaagtgaaaccattagcggctggttagcctggtatcagcagaaaccagggaaagcccctaagctcctgatctatgacgcatccaacttggagactggggtcccatcaaggttcagtggcagtggatctgggacagatttcactctcaccatcagcagtctgcaacctgaagattttgcaacttactactgtcaacagagttacagtaccccttggacgttcggccaagggaccaagctggaaatcaaaaccacgacgccagcgccgcggccaccaacaccggcgcccaccatcgcgtcgcagcccctgtccctgcgcccagaggcgtgccggccagcggcggggggcgcagtgcacacgagggggctggacttcgcctgtgatatctacatctgggcgcccttggccgggacttgtggggtccttctcctgtcactggttatcaccctttactgccggagggaccagaggctgccccccgatgcccacaagccccctgggggaggcagtttccggacccccatccaagaggagcaggccgacgcccactccaccctggccaagatcagagtgaagttcagcaggagcgcagacgcccccgcgtaccagcagggccagaaccagctctataacgagctcaatctaggacgaagagaggagtacgatgttttggacaagagacgtggccgggaccctgagatggggggaaagccgagaaggaagaaccctcaggaaggcctgtacaatgaactgcagaaagataagatggcggaggcctacagtgagattgggatgaaaggcgagcgccggaggggcaaggggcacgatggcctttaccagggtctcagtacagccaccaaggacacctacgacgcccttcacatgcaggccctgccccctcgcggctctggcgagggaaggggttccctgcttacttgcggcgacgtcgaagagaatcccggtccgatggccctcccagtaactgccctccttttgcccctcgcactccttcttcatgccgctcgccccaactgggtcaacgtgattagcgatttgaagaaaatcgaggaccttatacagtctatgcatattgacgctacactgtatactgagagtgatgtacacccgtcctgtaaggtaacggccatgaaatgctttcttctggagctccaggtcatcagcttggagtctggggacgcaagcatccacgatacggttgaaaacctcatcatccttgcgaacaactctctctcatctaatggaaacgttacagagagtgggtgtaaggagtgcgaagagttggaagaaaaaaacatcaaagaatttcttcaatccttcgttcacatagtgcaaatgttcattaacacgtccactaccacacccgccccgaggccacctacgccggcaccgactatcgccagtcaacccctctctctgcgccccgaggcttgccggcctgcggctggtggggcggtccacacccggggcctggattttgcgtgcgatatatacatctgggcacctcttgccggcacctgcggagtgctgcttctctcactcgttattacgctgtactgctaa

SEQ ID NO: 353 - DNA, 2172 bp, synthetic construct
  source 1..2172: mol_type = other DNA
atggccttaccagtgaccgccttgctcctgccgctggccttgctgctccacgccgccaggccggactacaaagacgatgacgataaaggcggtggtggctctggtggtggcggatcccaggtgcagctggtgcagtctggggctgaggtgaagaagcctggggcctcagtgaaggtttcctgcaaggcatctggatacaccttcaccagctacgacattaattgggtgcgacaggcccctggacaagggcttgagtggatgggagtgatcaaccctagtggtggaggtacaagctacgcacagaagttccagggcagagtcaccatgaccagggacacgtccacgagcacagtctacatggagctgagcagcctgagatctgaggacacggccgtgtattactgtgctagatattctggctatgattgggtgtttgactactggggccaagggaccctggtcaccgtctcctcaggtggaggcggttcaggcggaggtggctctggcggtggcggatcggacatccagatgacccagtctccatcctccctgtctgcatctgtaggagacagagtcaccatcacttgccgggcaagtcagggcattggcagctggttagcttggtatcagcagaaaccagggaaagcccctaagctcctgatctatgctgcatccacattgcaaagtggggtcccatcaaggttcagtggcagtggatctgggacagatttcactctcaccatcagcagtctgcaacctgaagattttgcaacttactactgtcaacagagttacagtaccccttggactttcggccctgggaccaaagtggatatcaaaaccacgacgccagcgccgcggccaccaacaccggcgcccaccatcgcgtcgcagcccctgtccctgcgcccagaggcgtgccggccagcggcggggggcgcagtgcacacgagggggctggacttcgcctgtgatatctacatctgggcgcccttggccgggacttgtggggtccttctcctgtcactggttatcaccctttactgccggagggaccagaggctgccccccgatgcccacaagccccctgggggaggcagtttccggacccccatccaagaggagcaggccgacgcccactccaccctggccaagatcagagtgaagttcagcaggagcgcagacgcccccgcgtaccagcagggccagaaccagctctataacgagctcaatctaggacgaagagaggagtacgatgttttggacaagagacgtggccgggaccctgagatggggggaaagccgagaaggaagaaccctcaggaaggcctgtacaatgaactgcagaaagataagatggcggaggcctacagtgagattgggatgaaaggcgagcgccggaggggcaaggggcacgatggcctttaccagggtctcagtacagccaccaaggacacctacgacgcccttcacatgcaggccctgccccctcgcggctctggcgagggaaggggttccctgcttacttgcggcgacgtcgaagagaatcccggtccgatggccctcccagtaactgccctccttttgcccctcgcactccttcttcatgccgctcgccccaactgggtcaacgtgattagcgatttgaagaaaatcgaggaccttatacagtctatgcatattgacgctacactgtatactgagagtgatgtacacccgtcctgtaaggtaacggccatgaaatgctttcttctggagctccaggtcatcagcttggagtctggggacgcaagcatccacgatacggttgaaaacctcatcatccttgcgaacaactctctctcatctaatggaaacgttacagagagtgggtgtaaggagtgcgaagagttggaagaaaaaaacatcaaagaatttcttcaatccttcgttcacatagtgcaaatgttcattaacacgtccactaccacacccgccccgaggccacctacgccggcaccgactatcgccagtcaacccctctctctgcgccccgaggcttgccggcctgcggctggtggggcggtccacacccggggcctggattttgcgtgcgatatatacatctgggcacctcttgccggcacctgcggagtgctgcttctctcactcgttattacgctgtactgctaa

SEQ ID NO: 354 - DNA, 2175 bp, synthetic construct
  source 1..2175: mol_type = other DNA
atggccttaccagtgaccgccttgctcctgccgctggccttgctgctccacgccgccaggccggactacaaagacgatgacgataaaggcggtggtggctctggtggtggcggatcccaggtgcagctggtgcagtctggggctgaggtgaagaagcctggggcctcagtgaaggtttcctgcaaggcatctggatacaccttcgctaactactatatgcactgggtgcgacaggcccctggacaagggcttgagtggatgggaataatcaaccctagtggtggtagcacaagctacgcacagaagttccagggcagagtcaccatgaccagggacacgtccacgagcacagtctacatggagctgagcagcctgagatctgaggacacggccgtgtattactgtgctagagatagcggctcctactttggttggttcgacccctggggccagggaaccctggtcaccgtctcctcaggtggaggcggttcaggcggaggtggctctggcggtggcggatcggacatccagatgacccagtctccatcctccctgtctgcatctgtaggagacagagtcaccatcacttgccgggcaagtcagagcattagcagctctttagcatggtatcagcagaaaccagggaaagcccctaagctcctgatctatgatgcatccagtttgcaaagtggggtcccatcaaggttcagtggcagtggatctgggacagatttcactctcaccatcagcagtctgcaacctgaagattttgcaacttactactgtcaacagagttacaacacccctcccactttcggcggagggaccaagctggagatcaaaaccacgacgccagcgccgcggccaccaacaccggcgcccaccatcgcgtcgcagcccctgtccctgcgcccagaggcgtgccggccagcggcggggggcgcagtgcacacgagggggctggacttcgcctgtgatatctacatctgggcgcccttggccgggacttgtggggtccttctcctgtcactggttatcaccctttactgccggagggaccagaggctgccccccgatgcccacaagccccctgggggaggcagtttccggacccccatccaagaggagcaggccgacgcccactccaccctggccaagatcagagtgaagttcagcaggagcgcagacgcccccgcgtaccagcagggccagaaccagctctataacgagctcaatctaggacgaagagaggagtacgatgttttggacaagagacgtggccgggaccctgagatggggggaaagccgagaaggaagaaccctcaggaaggcctgtacaatgaactgcagaaagataagatggcggaggcctacagtgagattgggatgaaaggcgagcgccggaggggcaaggggcacgatggcctttaccagggtctcagtacagccaccaaggacacctacgacgcccttcacatgcaggccctgccccctcgcggctctggcgagggaaggggttccctgcttacttgcggcgacgtcgaagagaatcccggtccgatggccctcccagtaactgccctccttttgcccctcgcactccttcttcatgccgctcgccccaactgggtcaacgtgattagcgatttgaagaaaatcgaggaccttatacagtctatgcatattgacgctacactgtatactgagagtgatgtacacccgtcctgtaaggtaacggccatgaaatgctttcttctggagctccaggtcatcagcttggagtctggggacgcaagcatccacgatacggttgaaaacctcatcatccttgcgaacaactctctctcatctaatggaaacgttacagagagtgggtgtaaggagtgcgaagagttggaagaaaaaaacatcaaagaatttcttcaatccttcgttcacatagtgcaaatgttcattaacacgtccactaccacacccgccccgaggccacctacgccggcaccgactatcgccagtcaacccctctctctgcgccccgaggcttgccggcctgcggctggtggggcggtccacacccggggcctggattttgcgtgcgatatatacatctgggcacctcttgccggcacctgcggagtgctgcttctctcactcgttattacgctgtactgctaa

SEQ ID NO: 355 - DNA, 2175 bp, synthetic construct
  source 1..2175: mol_type = other DNA
atggccttaccagtgaccgccttgctcctgccgctggccttgctgctccacgccgccaggccggactacaaagacgatgacgataaaggcggtggtggctctggtggtggcggatcccaggtgcagctggtgcagtctggggctgaggtgaagaagcctggggcctcagtgaaggtttcctgcaaggcatctggatacaccttcaccacatactatatgcactgggtgcgacaggcccctggacaagggcttgagtggatgggaataatcaaccctaccggcggtagcacatactacgcacagaagttccagggcagagtcaccatgaccagggacacgtccacgagcacagtctacatggagctgagcagcctgagatctgaggacacggccgtgtattactgtgctagagacagcgggaactatcaagggatctttgactactggggccaagggaccctggtcaccgtctcctcaggtggaggcggttcaggcggaggtggctctggcggtggcggatcggacatccagatgacccagtctccatcctccctgtctgcatctgtaggagacagagtcaccatcacttgccgggcaagtcaggggattggcggctatttagcctggtatcagcagaaaccagggaaagcccctaagctcctgatctatgatgcatccaatttggagaccggggtcccatcaaggttcagtggcagtggatctgggacagatttcactctcaccatcagcagtctgcaacctgaagattttgcaacttactactgtcaacagagttacgactcccctcccaccttcggccaagggacacgactggagattaaaaccacgacgccagcgccgcggccaccaacaccggcgcccaccatcgcgtcgcagcccctgtccctgcgcccagaggcgtgccggccagcggcggggggcgcagtgcacacgagggggctggacttcgcctgtgatatctacatctgggcgcccttggccgggacttgtggggtccttctcctgtcactggttatcaccctttactgccggagggaccagaggctgccccccgatgcccacaagccccctgggggaggcagtttccggacccccatccaagaggagcaggccgacgcccactccaccctggccaagatcagagtgaagttcagcaggagcgcagacgcccccgcgtaccagcagggccagaaccagctctataacgagctcaatctaggacgaagagaggagtacgatgttttggacaagagacgtggccgggaccctgagatggggggaaagccgagaaggaagaaccctcaggaaggcctgtacaatgaactgcagaaagataagatggcggaggcctacagtgagattgggatgaaaggcgagcgccggaggggcaaggggcacgatggcctttaccagggtctcagtacagccaccaaggacacctacgacgcccttcacatgcaggccctgccccctcgcggctctggcgagggaaggggttccctgcttacttgcggcgacgtcgaagagaatcccggtccgatggccctcccagtaactgccctccttttgcccctcgcactccttcttcatgccgctcgccccaactgggtcaacgtgattagcgatttgaagaaaatcgaggaccttatacagtctatgcatattgacgctacactgtatactgagagtgatgtacacccgtcctgtaaggtaacggccatgaaatgctttcttctggagctccaggtcatcagcttggagtctggggacgcaagcatccacgatacggttgaaaacctcatcatccttgcgaacaactctctctcatctaatggaaacgttacagagagtgggtgtaaggagtgcgaagagttggaagaaaaaaacatcaaagaatttcttcaatccttcgttcacatagtgcaaatgttcattaacacgtccactaccacacccgccccgaggccacctacgccggcaccgactatcgccagtcaacccctctctctgcgccccgaggcttgccggcctgcggctggtggggcggtccacacccggggcctggattttgcgtgcgatatatacatctgggcacctcttgccggcacctgcggagtgctgcttctctcactcgttattacgctgtactgctaa

SEQ ID NO: 356 - DNA, 2172 bp, synthetic construct
  source 1..2172: mol_type = other DNA
atggccttaccagtgaccgccttgctcctgccgctggccttgctgctccacgccgccaggccggactacaaagacgatgacgataaaggcggtggtggctctggtggtggcggatcccaggtgcagctggtgcagtctggggctgaggtgaagaagcctggggcctcagtgaaggtttcctgcaaggcatctggaaataccttcaccagctactatatgcactgggtgcgacaggcccctggacaagggcttgagtggatgggatggatcaaccccaacagtggtgacacaaattacgcacagaacttccagggcagagtcaccatgaccagggacacgtccacgagcacagtctacatggagctgagcagcctgagatctgaggacacggccgtgtattactgtgctagaggtgtcagcggttacgatctatttgactactggggccaagggaccctggtcaccgtctcctcaggtggaggcggttcaggcggaggtggctctggcggtggcggatcggacatccagatgacccagtctccatcctccctgtctgcatctgtaggagacagagtcaccatcacttgccgggcaagtcagagcgtgagcagctatttaaattggtatcagcagaaaccagggaaagcccctaagctcctgatctatgatacgtccaacttggagacgggggtcccatcaaggttcagtggcagtggatctgggacagatttcactctcaccatcagcagtctgcaacctgaagattttgcaacttactactgtcaacaggctcatagttttcctctcactttcggcggagggaccaaggtggagatcaaaaccacgacgccagcgccgcggccaccaacaccggcgcccaccatcgcgtcgcagcccctgtccctgcgcccagaggcgtgccggccagcggcggggggcgcagtgcacacgagggggctggacttcgcctgtgatatctacatctgggcgcccttggccgggacttgtggggtccttctcctgtcactggttatcaccctttactgccggagggaccagaggctgccccccgatgcccacaagccccctgggggaggcagtttccggacccccatccaagaggagcaggccgacgcccactccaccctggccaagatcagagtgaagttcagcaggagcgcagacgcccccgcgtaccagcagggccagaaccagctctataacgagctcaatctaggacgaagagaggagtacgatgttttggacaagagacgtggccgggaccctgagatggggggaaagccgagaaggaagaaccctcaggaaggcctgtacaatgaactgcagaaagataagatggcggaggcctacagtgagattgggatgaaaggcgagcgccggaggggcaaggggcacgatggcctttaccagggtctcagtacagccaccaaggacacctacgacgcccttcacatgcaggccctgccccctcgcggctctggcgagggaaggggttccctgcttacttgcggcgacgtcgaagagaatcccggtccgatggccctcccagtaactgccctccttttgcccctcgcactccttcttcatgccgctcgccccaactgggtcaacgtgattagcgatttgaagaaaatcgaggaccttatacagtctatgcatattgacgctacactgtatactgagagtgatgtacacccgtcctgtaaggtaacggccatgaaatgctttcttctggagctccaggtcatcagcttggagtctggggacgcaagcatccacgatacggttgaaaacctcatcatccttgcgaacaactctctctcatctaatggaaacgttacagagagtgggtgtaaggagtgcgaagagttggaagaaaaaaacatcaaagaatttcttcaatccttcgttcacatagtgcaaatgttcattaacacgtccactaccacacccgccccgaggccacctacgccggcaccgactatcgccagtcaacccctctctctgcgccccgaggcttgccggcctgcggctggtggggcggtccacacccggggcctggattttgcgtgcgatatatacatctgggcacctcttgccggcacctgcggagtgctgcttctctcactcgttattacgctgtactgctaa

SEQ ID NO: 357 - DNA, 2172 bp, synthetic construct
  source 1..2172: mol_type = other DNA
atggccttaccagtgaccgccttgctcctgccgctggccttgctgctccacgccgccaggccggactacaaagacgatgacgataaaggcggtggtggctctggtggtggcggatccgaggtgcagctggtggagtctgggggaggcttggtcaagcctggggggtccctgagactctcctgtgcagcgtctggattcaccttcagtagctatggcatgcactgggtccgccaggctccaggcaaggggctggagtgggtggcatcgataaaacatgatggaagtgagcaatactatgttgactccgtgaagggccgattcaccatctccagagacgattccaagaacacgctgtatctgcaaatgaacagcctgaaaacggaggacacggctgtgtattactgtgcggctagtggagtggatgtctggggccaagggacaaccgtcaccgtctcttcaggtggaggcggttcaggcggaggtggctctggcggtggcggatcggatattgtgatgactcagtctccactctccctgcccgtcacccctggagagccggcctccatctcctgcaggtctagtcagagcctcctgcacagcaatggctacaactatttggattggtacctgcagaagccagggcagtctccacagctcctgatctatttgggttctacccgggcctccggggtccctgacaggttcagtggcagtggatcaggcacagattttacactgaaaatcagcagagtggaggctgaggatgttggggtttattactgcatgcaagctctagatactcctctcactttcggcggagggaccaagttagagatcaaaaccacgacgccagcgccgcggccaccaacaccggcgcccaccatcgcgtcgcagcccctgtccctgcgcccagaggcgtgccggccagcggcggggggcgcagtgcacacgagggggctggacttcgcctgtgatatctacatctgggcgcccttggccgggacttgtggggtccttctcctgtcactggttatcaccctttactgccggagggaccagaggctgccccccgatgcccacaagccccctgggggaggcagtttccggacccccatccaagaggagcaggccgacgcccactccaccctggccaagatcagagtgaagttcagcaggagcgcagacgcccccgcgtaccagcagggccagaaccagctctataacgagctcaatctaggacgaagagaggagtacgatgttttggacaagagacgtggccgggaccctgagatggggggaaagccgagaaggaagaaccctcaggaaggcctgtacaatgaactgcagaaagataagatggcggaggcctacagtgagattgggatgaaaggcgagcgccggaggggcaaggggcacgatggcctttaccagggtctcagtacagccaccaaggacacctacgacgcccttcacatgcaggccctgccccctcgcggctctggcgagggaaggggttccctgcttacttgcggcgacgtcgaagagaatcccggtccgatggccctcccagtaactgccctccttttgcccctcgcactccttcttcatgccgctcgccccaactgggtcaacgtgattagcgatttgaagaaaatcgaggaccttatacagtctatgcatattgacgctacactgtatactgagagtgatgtacacccgtcctgtaaggtaacggccatgaaatgctttcttctggagctccaggtcatcagcttggagtctggggacgcaagcatccacgatacggttgaaaacctcatcatccttgcgaacaactctctctcatctaatggaaacgttacagagagtgggtgtaaggagtgcgaagagttggaagaaaaaaacatcaaagaatttcttcaatccttcgttcacatagtgcaaatgttcattaacacgtccactaccacacccgccccgaggccacctacgccggcaccgactatcgccagtcaacccctctctctgcgccccgaggcttgccggcctgcggctggtggggcggtccacacccggggcctggattttgcgtgcgatatatacatctgggcacctcttgccggcacctgcggagtgctgcttctctcactcgttattacgctgtactgctaa

SEQ ID NO: 358 - DNA, 2181 bp, synthetic construct
  source 1..2181: mol_type = other DNA
atggccttaccagtgaccgccttgctcctgccgctggccttgctgctccacgccgccaggccggactacaaagacgatgacgataaaggcggtggtggctctggtggtggcggatcccaggtgcagctggtgcagtctggggctgaggtgaagaagcctggggcctcagtgaaggtttcctgcaaggcatctggaggtaccttcagtcgttacgacattaattgggtgcgacaggcccctggacaagggcttgagtgggtgggaataatcgatcctacaggtgcgtcaacaagctacgcacagaagttccagggcagagtcaccatgaccagggacacgtccacgagcacagtctacatggagctgagcagcctgagatctgaggacacggccgtgtattactgtgctagagattacagttacgggatggattattatggcatggacgtctggggccaagggaccctggtcaccgtctcctcaggtggaggcggttcaggcggaggtggctctggcggtggcggatcggacatccagatgacccagtctccatcctccctgtctgcatctgtaggagacagagtcaccatcacttgccaggcgagtcaggacattagcaactatttaaattggtatcagcagaaaccagggaaagcccctaagctcctgatctacgatacctccaatttgcagacaggggtcccatcaaggttcagtggaagtggatctgggacagattttactcttaccatcagcagcctgcagcctgaagattttgcaacatattacctgagcacagatctgcagaccaccgctcacttcggccaagggaccaaggtggaaatcaaaaccacgacgccagcgccgcggccaccaacaccggcgcccaccatcgcgtcgcagcccctgtccctgcgcccagaggcgtgccggccagcggcggggggcgcagtgcacacgagggggctggacttcgcctgtgatatctacatctgggcgcccttggccgggacttgtggggtccttctcctgtcactggttatcaccctttactgccggagggaccagaggctgccccccgatgcccacaagccccctgggggaggcagtttccggacccccatccaagaggagcaggccgacgcccactccaccctggccaagatcagagtgaagttcagcaggagcgcagacgcccccgcgtaccagcagggccagaaccagctctataacgagctcaatctaggacgaagagaggagtacgatgttttggacaagagacgtggccgggaccctgagatggggggaaagccgagaaggaagaaccctcaggaaggcctgtacaatgaactgcagaaagataagatggcggaggcctacagtgagattgggatgaaaggcgagcgccggaggggcaaggggcacgatggcctttaccagggtctcagtacagccaccaaggacacctacgacgcccttcacatgcaggccctgccccctcgcggctctggcgagggaaggggttccctgcttacttgcggcgacgtcgaagagaatcccggtccgatggccctcccagtaactgccctccttttgcccctcgcactccttcttcatgccgctcgccccaactgggtcaacgtgattagcgatttgaagaaaatcgaggaccttatacagtctatgcatattgacgctacactgtatactgagagtgatgtacacccgtcctgtaaggtaacggccatgaaatgctttcttctggagctccaggtcatcagcttggagtctggggacgcaagcatccacgatacggttgaaaacctcatcatccttgcgaacaactctctctcatctaatggaaacgttacagagagtgggtgtaaggagtgcgaagagttggaagaaaaaaacatcaaagaatttcttcaatccttcgttcacatagtgcaaatgttcattaacacgtccactaccacacccgccccgaggccacctacgccggcaccgactatcgccagtcaacccctctctctgcgccccgaggcttgccggcctgcggctggtggggcggtccacacccggggcctggattttgcgtgcgatatatacatctgggcacctcttgccggcacctgcggagtgctgcttctctcactcgttattacgctgtactgctaa

SEQ ID NO: 359 - DNA, 2187 bp, synthetic construct
  source 1..2187: mol_type = other DNA
atggccttaccagtgaccgccttgctcctgccgctggccttgctgctccacgccgccaggccggactacaaagacgatgacgataaaggcggtggtggctctggtggtggcggatcccaggtgcagctggtgcagtctggggctgaggtgaagaagcctgggtcctcggtgaaggtctcctgcaaggcttctggatacaccttcaccagctatggaatcagctgggtgcgacaggcccctggacaagggcttgagtggatgggaggtatcatccctatctttggtacaacgaactacgcacagaagttccagggcagagtcacgattaccgcggacgaatccacgagcacagcctacatggagctgagcagcctgagatctgaggacacggccgtgtattactgtgcgagagatcatagcggcgatgggtacttcgatctctggggccgtggcaccctggtcactgtctcctcaggtggaggcggttcaggcggaggtggctctggcggtggcggatcggatattgtgatgactcagtctccactctccctgcccgtcacccctggagagccggcctccatctcctgcaggtctagtcagagcctcctgcactccaacggatacaactatttggattggtacctgcagaagccagggcagtctccacagctcctgatctatgatgcctcttcacttcagtccggggtccctgacaggttcagtggcagtggatcaggcacagattttacactgaaaatcagcagagtggaggctgaggatgttggggtttattactgcatgcaaggaacacactggcctcccacgttcggccaagggaccaaggtggaaatcaaaaccacgacgccagcgccgcggccaccaacaccggcgcccaccatcgcgtcgcagcccctgtccctgcgcccagaggcgtgccggccagcggcggggggcgcagtgcacacgagggggctggacttcgcctgtgatatctacatctgggcgcccttggccgggacttgtggggtccttctcctgtcactggttatcaccctttactgccggagggaccagaggctgccccccgatgcccacaagccccctgggggaggcagtttccggacccccatccaagaggagcaggccgacgcccactccaccctggccaagatcagagtgaagttcagcaggagcgcagacgcccccgcgtaccagcagggccagaaccagctctataacgagctcaatctaggacgaagagaggagtacgatgttttggacaagagacgtggccgggaccctgagatggggggaaagccgagaaggaagaaccctcaggaaggcctgtacaatgaactgcagaaagataagatggcggaggcctacagtgagattgggatgaaaggcgagcgccggaggggcaaggggcacgatggcctttaccagggtctcagtacagccaccaaggacacctacgacgcccttcacatgcaggccctgccccctcgcggctctggcgagggaaggggttccctgcttacttgcggcgacgtcgaagagaatcccggtccgatggccctcccagtaactgccctccttttgcccctcgcactccttcttcatgccgctcgccccaactgggtcaacgtgattagcgatttgaagaaaatcgaggaccttatacagtctatgcatattgacgctacactgtatactgagagtgatgtacacccgtcctgtaaggtaacggccatgaaatgctttcttctggagctccaggtcatcagcttggagtctggggacgcaagcatccacgatacggttgaaaacctcatcatccttgcgaacaactctctctcatctaatggaaacgttacagagagtgggtgtaaggagtgcgaagagttggaagaaaaaaacatcaaagaatttcttcaatccttcgttcacatagtgcaaatgttcattaacacgtccactaccacacccgccccgaggccacctacgccggcaccgactatcgccagtcaacccctctctctgcgccccgaggcttgccggcctgcggctggtggggcggtccacacccggggcctggattttgcgtgcgatatatacatctgggcacctcttgccggcacctgcggagtgctgcttctctcactcgttattacgctgtactgctaa

SEQ ID NO: 360 - DNA, 2169 bp, synthetic construct
  source 1..2169: mol_type = other DNA
atggccttaccagtgaccgccttgctcctgccgctggccttgctgctccacgccgccaggccggactacaaagacgatgacgataaaggcggtggtggctctggtggtggcggatcccaggtgcagctggtgcagtctggggctgaggtgaagaagcctggggcctcagtgaaggtctcctgcaaggcttctggatacaccttcaccgagaatgagatgcactgggtgcgacaggcccctggacaagggcttgagtggatgggatggatcaacccgaacagtggtggcacaaactatgcacagaagtttcagggcagggtcaccatgaccagggacacgtccactagcacagtgtacatggagctgagctctctgagatctgaagacacggccgtgtattactgtgcggggagctggggtggttactactttgactactggggccaagggaccctggtcaccgtctcctcaggtggaggcggttcaggcggaggtggctctggcggtggcggatcggacatccagatgacccagtctccatcctccctgtctgcatctgtaggagacagagtcaccatcacttgccgggcaagtcagagcgttagcagatatttaaattggtatcagcagaaaccagggaaagcccctaagctcctgatctatgatgcatccaatttggaaaccggggtcccatcaaggttcagtggcagtggatctgggacagatttcactctcaccatcagcagtctgcaacctgaagattttgcaacttactactgtcaacaggccgacagtttccctgtgacttttggccaggggaccaagctggagatcaaaaccacgacgccagcgccgcggccaccaacaccggcgcccaccatcgcgtcgcagcccctgtccctgcgcccagaggcgtgccggccagcggcggggggcgcagtgcacacgagggggctggacttcgcctgtgatatctacatctgggcgcccttggccgggacttgtggggtccttctcctgtcactggttatcaccctttactgccggagggaccagaggctgccccccgatgcccacaagccccctgggggaggcagtttccggacccccatccaagaggagcaggccgacgcccactccaccctggccaagatcagagtgaagttcagcaggagcgcagacgcccccgcgtaccagcagggccagaaccagctctataacgagctcaatctaggacgaagagaggagtacgatgttttggacaagagacgtggccgggaccctgagatggggggaaagccgagaaggaagaaccctcaggaaggcctgtacaatgaactgcagaaagataagatggcggaggcctacagtgagattgggatgaaaggcgagcgccggaggggcaaggggcacgatggcctttaccagggtctcagtacagccaccaaggacacctacgacgcccttcacatgcaggccctgccccctcgcggctctggcgagggaaggggttccctgcttacttgcggcgacgtcgaagagaatcccggtccgatggccctcccagtaactgccctccttttgcccctcgcactccttcttcatgccgctcgccccaactgggtcaacgtgattagcgatttgaagaaaatcgaggaccttatacagtctatgcatattgacgctacactgtatactgagagtgatgtacacccgtcctgtaaggtaacggccatgaaatgctttcttctggagctccaggtcatcagcttggagtctggggacgcaagcatccacgatacggttgaaaacctcatcatccttgcgaacaactctctctcatctaatggaaacgttacagagagtgggtgtaaggagtgcgaagagttggaagaaaaaaacatcaaagaatttcttcaatccttcgttcacatagtgcaaatgttcattaacacgtccactaccacacccgccccgaggccacctacgccggcaccgactatcgccagtcaacccctctctctgcgccccgaggcttgccggcctgcggctggtggggcggtccacacccggggcctggattttgcgtgcgatatatacatctgggcacctcttgccggcacctgcggagtgctgcttctctcactcgttattacgctgtactgctaa

SEQ ID NO: 361 - DNA, 2178 bp, synthetic construct
  source 1..2178: mol_type = other DNA
atggccttaccagtgaccgccttgctcctgccgctggccttgctgctccacgccgccaggccggactacaaagacgatgacgataaaggcggtggtggctctggtggtggcggatcccaggtgcagctggtgcagtctggggctgaggtgaagaagcctggggcctcagtgaaggtttcctgcaaggcatctggatacaccttcaccaactactatatctactgggtgcgacaggcccctggacaagggcttgagtggatgggatggatcaaccccaatgacggtgcaacaaattacgcacagaagttccagggcagagtcaccatgaccagggacacgtccacgagcacagtctacatggagctgagcagcctgagatctgaggacacggccgtgtattactgtgctagagaaggcaacgattactattattatttcatggactactggggccaagggaccctggtcaccgtctcctcaggtggaggcggttcaggcggaggtggctctggcggtggcggatcggacatccagatgacccagtctccatcctccctgtctgcatctgtaggagacagagtcaccatcacttgccgggcaagtcagggcattagcaacaatttaaattggtatcagcagaaaccagggaaagcccctaagctcctgatctatcatgcatccaacttggagacgggggtcccatcaaggttcagtggcagtggatctgggacagatttcactctcaccatcagcagtctgcaacctgaagattttgcaacttactactgtcaacagagttacgacggccctatgacttttggccaggggaccaagctggagatcaaaaccacgacgccagcgccgcggccaccaacaccggcgcccaccatcgcgtcgcagcccctgtccctgcgcccagaggcgtgccggccagcggcggggggcgcagtgcacacgagggggctggacttcgcctgtgatatctacatctgggcgcccttggccgggacttgtggggtccttctcctgtcactggttatcaccctttactgccggagggaccagaggctgccccccgatgcccacaagccccctgggggaggcagtttccggacccccatccaagaggagcaggccgacgcccactccaccctggccaagatcagagtgaagttcagcaggagcgcagacgcccccgcgtaccagcagggccagaaccagctctataacgagctcaatctaggacgaagagaggagtacgatgttttggacaagagacgtggccgggaccctgagatggggggaaagccgagaaggaagaaccctcaggaaggcctgtacaatgaactgcagaaagataagatggcggaggcctacagtgagattgggatgaaaggcgagcgccggaggggcaaggggcacgatggcctttaccagggtctcagtacagccaccaaggacacctacgacgcccttcacatgcaggccctgccccctcgcggctctggcgagggaaggggttccctgcttacttgcggcgacgtcgaagagaatcccggtccgatggccctcccagtaactgccctccttttgcccctcgcactccttcttcatgccgctcgccccaactgggtcaacgtgattagcgatttgaagaaaatcgaggaccttatacagtctatgcatattgacgctacactgtatactgagagtgatgtacacccgtcctgtaaggtaacggccatgaaatgctttcttctggagctccaggtcatcagcttggagtctggggacgcaagcatccacgatacggttgaaaacctcatcatccttgcgaacaactctctctcatctaatggaaacgttacagagagtgggtgtaaggagtgcgaagagttggaagaaaaaaacatcaaagaatttcttcaatccttcgttcacatagtgcaaatgttcattaacacgtccactaccacacccgccccgaggccacctacgccggcaccgactatcgccagtcaacccctctctctgcgccccgaggcttgccggcctgcggctggtggggcggtccacacccggggcctggattttgcgtgcgatatatacatctgggcacctcttgccggcacctgcggagtgctgcttctctcactcgttattacgctgtactgctaa

SEQ ID NO: 362 - DNA, 2196 bp, synthetic construct
  source 1..2196: mol_type = other DNA
atggccttaccagtgaccgccttgctcctgccgctggccttgctgctccacgccgccaggccggactacaaagacgatgacgataaaggcggtggtggctctggtggtggcggatcccaggtgcagctggtgcagtctggggctgaggtgaagaagcctgggtcctcggtgaaggtctcctgcaaggcttctggaggcaccttcagcagctatgctatcagctgggtgcgacaggcccctggacaagggcttgagtggatgggaggaatcacaccaatgtttggtacaacggactacgcacagaagttccagggcagagtcacgattaccgcggacgaatccacgagcacagcctacatggagctgagcagcctgagatctgaggacacggccgtgtattactgtgcgagagatgagcgggacggatacgccacagtggcttttgatatctggggccaagggacaatggtcaccgtctcttcaggtggaggcggttcaggcggaggtggctctggcggtggcggatcggatattgtgatgactcagtctccactctccctgcccgtcacccctggagagccggcctccatctcctgcaggtctagtcagagcctcctgcatagcaatggatacaactatttggattggtacctgcagaagccagggcagtctccacagctcctgatctatgatgcttctaatcttgagacaggggtccctgacaggttcagtggcagtggatcaggcacagattttacactgaaaatcagcagagtggaggctgaggatgttggggtttattactgcatgcaagggacgcattggcctcccacgttcggccaagggaccaaggtggaaatcaaaaccacgacgccagcgccgcggccaccaacaccggcgcccaccatcgcgtcgcagcccctgtccctgcgcccagaggcgtgccggccagcggcggggggcgcagtgcacacgagggggctggacttcgcctgtgatatctacatctgggcgcccttggccgggacttgtggggtccttctcctgtcactggttatcaccctttactgccggagggaccagaggctgccccccgatgcccacaagccccctgggggaggcagtttccggacccccatccaagaggagcaggccgacgcccactccaccctggccaagatcagagtgaagttcagcaggagcgcagacgcccccgcgtaccagcagggccagaaccagctctataacgagctcaatctaggacgaagagaggagtacgatgttttggacaagagacgtggccgggaccctgagatggggggaaagccgagaaggaagaaccctcaggaaggcctgtacaatgaactgcagaaagataagatggcggaggcctacagtgagattgggatgaaaggcgagcgccggaggggcaaggggcacgatggcctttaccagggtctcagtacagccaccaaggacacctacgacgcccttcacatgcaggccctgccccctcgcggctctggcgagggaaggggttccctgcttacttgcggcgacgtcgaagagaatcccggtccgatggccctcccagtaactgccctccttttgcccctcgcactccttcttcatgccgctcgccccaactgggtcaacgtgattagcgatttgaagaaaatcgaggaccttatacagtctatgcatattgacgctacactgtatactgagagtgatgtacacccgtcctgtaaggtaacggccatgaaatgctttcttctggagctccaggtcatcagcttggagtctggggacgcaagcatccacgatacggttgaaaacctcatcatccttgcgaacaactctctctcatctaatggaaacgttacagagagtgggtgtaaggagtgcgaagagttggaagaaaaaaacatcaaagaatttcttcaatccttcgttcacatagtgcaaatgttcattaacacgtccactaccacacccgccccgaggccacctacgccggcaccgactatcgccagtcaacccctctctctgcgccccgaggcttgccggcctgcggctggtggggcggtccacacccggggcctggattttgcgtgcgatatatacatctgggcacctcttgccggcacctgcggagtgctgcttctctcactcgttattacgctgtactgctaa

SEQ ID NO: 363 - DNA, 2181 bp, synthetic construct
  source 1..2181: mol_type = other DNA
atggccttaccagtgaccgccttgctcctgccgctggccttgctgctccacgccgccaggccggactacaaagacgatgacgataaaggcggtggtggctctggtggtggcggatcccaggtgcagctggtgcagtctggggctgaggtgaagaagcctggggcctcagtgaaggtttcctgcaaggcatctggatacaccttcaccagctactatatgcactgggtgcgacaggcccctggacaagggcttgagtggatgggaataatcaaccctagtgacggaggaacaagctacgcagacaagttccagggcagagtcaccatgaccagggacacgtccacgagcacagtctacatggagctgagcagcctgagatctgaggacacggccgtgtattactgtgctagagcgcttgcccccctgggatggggtgacggcatggatgtctggggccaagggacaacagtcaccgtctcttcaggtggaggcggttcaggcggaggtggctctggcggtggcggatcggacatccagatgacccagtctccatcctccctgtctgcatctgtaggagacagagtcaccatcacttgccaggcgagtcaggacattagcaactatttaaattggtatcagcagaaaccagggaaagcccctaagctcctgatctacgatgcatccaatttggaaacaggggtcccatcaaggttcagtggaagtggatctgggacagattttactctcaccatcagcagcctgcagcctgaagatttcgcaacatattactgtcaacagtcatatgatggacctatcaccttcggccaagggacacgactggagattaaaaccacgacgccagcgccgcggccaccaacaccggcgcccaccatcgcgtcgcagcccctgtccctgcgcccagaggcgtgccggccagcggcggggggcgcagtgcacacgagggggctggacttcgcctgtgatatctacatctgggcgcccttggccgggacttgtggggtccttctcctgtcactggttatcaccctttactgccggagggaccagaggctgccccccgatgcccacaagccccctgggggaggcagtttccggacccccatccaagaggagcaggccgacgcccactccaccctggccaagatcagagtgaagttcagcaggagcgcagacgcccccgcgtaccagcagggccagaaccagctctataacgagctcaatctaggacgaagagaggagtacgatgttttggacaagagacgtggccgggaccctgagatggggggaaagccgagaaggaagaaccctcaggaaggcctgtacaatgaactgcagaaagataagatggcggaggcctacagtgagattgggatgaaaggcgagcgccggaggggcaaggggcacgatggcctttaccagggtctcagtacagccaccaaggacacctacgacgcccttcacatgcaggccctgccccctcgcggctctggcgagggaaggggttccctgcttacttgcggcgacgtcgaagagaatcccggtccgatggccctcccagtaactgccctccttttgcccctcgcactccttcttcatgccgctcgccccaactgggtcaacgtgattagcgatttgaagaaaatcgaggaccttatacagtctatgcatattgacgctacactgtatactgagagtgatgtacacccgtcctgtaaggtaacggccatgaaatgctttcttctggagctccaggtcatcagcttggagtctggggacgcaagcatccacgatacggttgaaaacctcatcatccttgcgaacaactctctctcatctaatggaaacgttacagagagtgggtgtaaggagtgcgaagagttggaagaaaaaaacatcaaagaatttcttcaatccttcgttcacatagtgcaaatgttcattaacacgtccactaccacacccgccccgaggccacctacgccggcaccgactatcgccagtcaacccctctctctgcgccccgaggcttgccggcctgcggctggtggggcggtccacacccggggcctggattttgcgtgcgatatatacatctgggcacctcttgccggcacctgcggagtgctgcttctctcactcgttattacgctgtactgctaa

SEQ ID NO: 364 - DNA, 2172 bp, synthetic construct
  source 1..2172: mol_type = other DNA
atggccttaccagtgaccgccttgctcctgccgctggccttgctgctccacgccgccaggccggactacaaagacgatgacgataaaggcggtggtggctctggtggtggcggatcccaggtgcagctggtgcagtctggggctgaggtgaagaagcctgggtcctcggtgaaggtctcctgcaaggcttctggatacaccttcactagctattacatccactgggtgcgacaggcccctggacaagggcttgagtggatgggatggatgaatccctcctcaggtgttacgaacttcgcacagaagttccagggcagagtcacgattaccgcggacgaatccacgagcacagcctacatggagctgagcagcctgagatctgaggacacggccgtgtattactgtgcgagaggttcggaccagggtgactggtctgacccctggggccagggaaccctggtcaccgtctcctcaggtggaggcggttcaggcggaggtggctctggcggtggcggatcggacatccagatgacccagtctccatcctccctgtctgcatctgtaggagacagagtcaccatcacttgccgggcaagtcagagcattagcagctatttaaattggtatcagcagaaaccagggaaagcccctaagctcctgatctatgacgcatccaacttggaaacgggggtcccatcaaggttcagtggcagtggatctgggacagatttcactctcaccatcagcagtctgcaacctgaagattttgcaacttactactgtcaacagagttacaatacccctccaactttcggcggagggaccaaggtggagatcaaaaccacgacgccagcgccgcggccaccaacaccggcgcccaccatcgcgtcgcagcccctgtccctgcgcccagaggcgtgccggccagcggcggggggcgcagtgcacacgagggggctggacttcgcctgtgatatctacatctgggcgcccttggccgggacttgtggggtccttctcctgtcactggttatcaccctttactgccggagggaccagaggctgccccccgatgcccacaagccccctgggggaggcagtttccggacccccatccaagaggagcaggccgacgcccactccaccctggccaagatcagagtgaagttcagcaggagcgcagacgcccccgcgtaccagcagggccagaaccagctctataacgagctcaatctaggacgaagagaggagtacgatgttttggacaagagacgtggccgggaccctgagatggggggaaagccgagaaggaagaaccctcaggaaggcctgtacaatgaactgcagaaagataagatggcggaggcctacagtgagattgggatgaaaggcgagcgccggaggggcaaggggcacgatggcctttaccagggtctcagtacagccaccaaggacacctacgacgcccttcacatgcaggccctgccccctcgcggctctggcgagggaaggggttccctgcttacttgcggcgacgtcgaagagaatcccggtccgatggccctcccagtaactgccctccttttgcccctcgcactccttcttcatgccgctcgccccaactgggtcaacgtgattagcgatttgaagaaaatcgaggaccttatacagtctatgcatattgacgctacactgtatactgagagtgatgtacacccgtcctgtaaggtaacggccatgaaatgctttcttctggagctccaggtcatcagcttggagtctggggacgcaagcatccacgatacggttgaaaacctcatcatccttgcgaacaactctctctcatctaatggaaacgttacagagagtgggtgtaaggagtgcgaagagttggaagaaaaaaacatcaaagaatttcttcaatccttcgttcacatagtgcaaatgttcattaacacgtccactaccacacccgccccgaggccacctacgccggcaccgactatcgccagtcaacccctctctctgcgccccgaggcttgccggcctgcggctggtggggcggtccacacccggggcctggattttgcgtgcgatatatacatctgggcacctcttgccggcacctgcggagtgctgcttctctcactcgttattacgctgtactgctaa

SEQ ID NO: 365 - DNA, 2181 bp, synthetic construct
  source 1..2181: mol_type = other DNA
atggccttaccagtgaccgccttgctcctgccgctggccttgctgctccacgccgccaggccggactacaaagacgatgacgataaaggcggtggtggctctggtggtggcggatcccaggtgcagctggtgcagtctggggctgaggtgaagaagcctggggcctcagtgaaggtttcctgcaaggcatctggatacaccttcaccgactcctatatacactgggtgcgacaggcccctggacaagggcttgagtggattggatggatgaaccctaatacaggtgacacaggctacgcacagaagttccagggcagagtcaccatgaccagggacacgtccacgagcacagtctacatggagctgagcagcctgagatctgaggacacggccgtgtattactgtgctaaggacgactttggagagcttgctccagccaccttcgacccctggggccagggaaccctggtcaccgtctcctcaggtggaggcggttcaggcggaggtggctctggcggtggcggatcggacatccagatgacccagtctccatcctccctgtctgcatctgtaggagacagagtcaccatcacttgccaggcaagtcaggacattagcaattatttaaattggtatcagcagaaaccagggaaagcccctaagctcctgatctatggtgcatccagtttgcaaagtggggtcccatcaaggttcagtggcagtggatctgggacagatttcactctcaccatcagcagtctgcaacctgaagattttgcaacttactactgtctgcaggatgcggcgacccctatcaccttcggccaagggacacgactggagattaaaaccacgacgccagcgccgcggccaccaacaccggcgcccaccatcgcgtcgcagcccctgtccctgcgcccagaggcgtgccggccagcggcggggggcgcagtgcacacgagggggctggacttcgcctgtgatatctacatctgggcgcccttggccgggacttgtggggtccttctcctgtcactggttatcaccctttactgccggagggaccagaggctgccccccgatgcccacaagccccctgggggaggcagtttccggacccccatccaagaggagcaggccgacgcccactccaccctggccaagatcagagtgaagttcagcaggagcgcagacgcccccgcgtaccagcagggccagaaccagctctataacgagctcaatctaggacgaagagaggagtacgatgttttggacaagagacgtggccgggaccctgagatggggggaaagccgagaaggaagaaccctcaggaaggcctgtacaatgaactgcagaaagataagatggcggaggcctacagtgagattgggatgaaaggcgagcgccggaggggcaaggggcacgatggcctttaccagggtctcagtacagccaccaaggacacctacgacgcccttcacatgcaggccctgccccctcgcggctctggcgagggaaggggttccctgcttacttgcggcgacgtcgaagagaatcccggtccgatggccctcccagtaactgccctccttttgcccctcgcactccttcttcatgccgctcgccccaactgggtcaacgtgattagcgatttgaagaaaatcgaggaccttatacagtctatgcatattgacgctacactgtatactgagagtgatgtacacccgtcctgtaaggtaacggccatgaaatgctttcttctggagctccaggtcatcagcttggagtctggggacgcaagcatccacgatacggttgaaaacctcatcatccttgcgaacaactctctctcatctaatggaaacgttacagagagtgggtgtaaggagtgcgaagagttggaagaaaaaaacatcaaagaatttcttcaatccttcgttcacatagtgcaaatgttcattaacacgtccactaccacacccgccccgaggccacctacgccggcaccgactatcgccagtcaacccctctctctgcgccccgaggcttgccggcctgcggctggtggggcggtccacacccggggcctggattttgcgtgcgatatatacatctgggcacctcttgccggcacctgcggagtgctgcttctctcactcgttattacgctgtactgctaa

SEQ ID NO: 366 - DNA, 2181 bp, synthetic construct
  source 1..2181: mol_type = other DNA
atggccttaccagtgaccgccttgctcctgccgctggccttgctgctccacgccgccaggccggactacaaagacgatgacgataaaggcggtggtggctctggtggtggcggatcccaggtgcagctggtgcagtctggggctgaggtgaagaagcctggggcctcagtgaaggtttcctgcaaggcatctggatacaccttcaccagctacgacatcaattgggtgcgacaggcccctggacaagggcttgagtggatgggagtcatcagccctagtggtggtggaacaagctacgcacagaagttccagggcagagtcaccatgaccagggacacgtccacgagcacagtctacatggagctgagcagcctgagatctgaggacacggccgtgtattactgtgctagatactacggcggcaaccccgaagggtggtacttcgatctctggggccgtggcaccctggtcactgtctcctcaggtggaggcggttcaggcggaggtggctctggcggtggcggatcggacatccagatgacccagtctccatcctccctgtctgcatctgtaggagacagagtcaccatcacttgccgggcaagtcagagcattggaaattggttagcctggtatcagcagaaaccagggaaagcccctaagctcctgatctatgacgcatccgatttggaaaccggggtcccatcaaggttcagtggcagtggatctgggacagatttcactctcaccatcagcagtctgcaacctgaagattttgcaacttactactgtcaacagagttacactaccccttggacgttcggccaagggaccaaggtggaaatcaaaaccacgacgccagcgccgcggccaccaacaccggcgcccaccatcgcgtcgcagcccctgtccctgcgcccagaggcgtgccggccagcggcggggggcgcagtgcacacgagggggctggacttcgcctgtgatatctacatctgggcgcccttggccgggacttgtggggtccttctcctgtcactggttatcaccctttactgccggagggaccagaggctgccccccgatgcccacaagccccctgggggaggcagtttccggacccccatccaagaggagcaggccgacgcccactccaccctggccaagatcagagtgaagttcagcaggagcgcagacgcccccgcgtaccagcagggccagaaccagctctataacgagctcaatctaggacgaagagaggagtacgatgttttggacaagagacgtggccgggaccctgagatggggggaaagccgagaaggaagaaccctcaggaaggcctgtacaatgaactgcagaaagataagatggcggaggcctacagtgagattgggatgaaaggcgagcgccggaggggcaaggggcacgatggcctttaccagggtctcagtacagccaccaaggacacctacgacgcccttcacatgcaggccctgccccctcgcggctctggcgagggaaggggttccctgcttacttgcggcgacgtcgaagagaatcccggtccgatggccctcccagtaactgccctccttttgcccctcgcactccttcttcatgccgctcgccccaactgggtcaacgtgattagcgatttgaagaaaatcgaggaccttatacagtctatgcatattgacgctacactgtatactgagagtgatgtacacccgtcctgtaaggtaacggccatgaaatgctttcttctggagctccaggtcatcagcttggagtctggggacgcaagcatccacgatacggttgaaaacctcatcatccttgcgaacaactctctctcatctaatggaaacgttacagagagtgggtgtaaggagtgcgaagagttggaagaaaaaaacatcaaagaatttcttcaatccttcgttcacatagtgcaaatgttcattaacacgtccactaccacacccgccccgaggccacctacgccggcaccgactatcgccagtcaacccctctctctgcgccccgaggcttgccggcctgcggctggtggggcggtccacacccggggcctggattttgcgtgcgatatatacatctgggcacctcttgccggcacctgcggagtgctgcttctctcactcgttattacgctgtactgctaa

SEQ ID NO: 367 - DNA, 2226 bp, synthetic construct
  source 1..2226: mol_type = other DNA
atggccttaccagtgaccgccttgctcctgccgctggccttgctgctccacgccgccaggccggactacaaagacgatgacgataaaggcggtggtggctctggtggtggcggatccgaggtgcagctgctggagtctgggggaggcctcgtccagcctgggggctccctgagactctcctgtgcagcctctggattcgttttcgatgactatgctatccactgggtccgccaggctccgggcaaggggctagagtgggtggcagcgatatcatatgatggaagtaataaatactacgcagactccgtgaagggccgattcaccatctccagagacaattccaagaacacgctgtatctgcaaatgaacagcctgagagctgaggacacggctgtgtattactgtgcgagagctccacaatattatgggagtggcaccgacccacttgaggttagatactactactacggcatggacgtgtggggccaagggaccacggtcaccgtctcctcaggtggaggcggttcaggcggaggtggctctggcggtggcggatcggatattgtgatgactcagtctccactctccctgcccgtcacccctggagagccggcctccatctcctgcaggtctagtcagagcctcttgcattctaatggctacaactatttggattggtacctgcagaagccagggcagtctccacagctcctgatctatgaagtctctaatcgggcctccggggtccctgacaggttcagtggcagtggatcaggcacagattttacactgaaaatcagcagagtggaggctgaggatgttggggtttattactgcatgaaaggcctacaaactcctctgactttcggccctgggaccaaagtggatatcaaaaccacgacgccagcgccgcggccaccaacaccggcgcccaccatcgcgtcgcagcccctgtccctgcgcccagaggcgtgccggccagcggcggggggcgcagtgcacacgagggggctggacttcgcctgtgatatctacatctgggcgcccttggccgggacttgtggggtccttctcctgtcactggttatcaccctttactgccggagggaccagaggctgccccccgatgcccacaagccccctgggggaggcagtttccggacccccatccaagaggagcaggccgacgcccactccaccctggccaagatcagagtgaagttcagcaggagcgcagacgcccccgcgtaccagcagggccagaaccagctctataacgagctcaatctaggacgaagagaggagtacgatgttttggacaagagacgtggccgggaccctgagatggggggaaagccgagaaggaagaaccctcaggaaggcctgtacaatgaactgcagaaagataagatggcggaggcctacagtgagattgggatgaaaggcgagcgccggaggggcaaggggcacgatggcctttaccagggtctcagtacagccaccaaggacacctacgacgcccttcacatgcaggccctgccccctcgcggctctggcgagggaaggggttccctgcttacttgcggcgacgtcgaagagaatcccggtccgatggccctcccagtaactgccctccttttgcccctcgcactccttcttcatgccgctcgccccaactgggtcaacgtgattagcgatttgaagaaaatcgaggaccttatacagtctatgcatattgacgctacactgtatactgagagtgatgtacacccgtcctgtaaggtaacggccatgaaatgctttcttctggagctccaggtcatcagcttggagtctggggacgcaagcatccacgatacggttgaaaacctcatcatccttgcgaacaactctctctcatctaatggaaacgttacagagagtgggtgtaaggagtgcgaagagttggaagaaaaaaacatcaaagaatttcttcaatccttcgttcacatagtgcaaatgttcattaacacgtccactaccacacccgccccgaggccacctacgccggcaccgactatcgccagtcaacccctctctctgcgccccgaggcttgccggcctgcggctggtggggcggtccacacccggggcctggattttgcgtgcgatatatacatctgggcacctcttgccggcacctgcggagtgctgcttctctcactcgttattacgctgtactgctaa

SEQ ID NO: 368 - DNA, 2181 bp, synthetic construct
  source 1..2181: mol_type = other DNA
atggccttaccagtgaccgccttgctcctgccgctggccttgctgctccacgccgccaggccggactacaaagacgatgacgataaaggcggtggtggctctggtggtggcggatcccaggtgcagctggtgcagtctggggctgaggtgaagaagcctgggtcctcggtgaaggtctcctgcaaggcttctggaggcaccttccgcaattatgctatcagctgggtgcgacaggcccctggacaagggcttgagtggatgggaggtatcatccctatctttggtacagcaaactacgcacagaagttccagggcagagtcacgattaccgcggacgaatccacgagcacagcctacatggagctgagcagcctgagatctgaggacacggccgtgtattactgtgcgagagatcacagtgctgggactcaccacgacgcttttgatatctggggccaagggacaatggtcaccgtctcttcaggtggaggcggttcaggcggaggtggctctggcggtggcggatcggacatccagatgacccagtctccatcctccctgtctgcatctgtaggagacagagtcaccatcacttgccgggcaagtcagggcattagcaactatttagcctggtatcagcagaaaccagggaaagcccctaagctcctgatctatgctgcatccagtttgcaaagtggggtcccatcaaggttcagtggcagtggatctgggacagatttcactctcaccatcagcagtctgcaacctgaagattttgcaacttactactgtcaacagagtcacagtacccctctcactttcggccaagggaccaaggtggagatcaaaaccacgacgccagcgccgcggccaccaacaccggcgcccaccatcgcgtcgcagcccctgtccctgcgcccagaggcgtgccggccagcggcggggggcgcagtgcacacgagggggctggacttcgcctgtgatatctacatctgggcgcccttggccgggacttgtggggtccttctcctgtcactggttatcaccctttactgccggagggaccagaggctgccccccgatgcccacaagccccctgggggaggcagtttccggacccccatccaagaggagcaggccgacgcccactccaccctggccaagatcagagtgaagttcagcaggagcgcagacgcccccgcgtaccagcagggccagaaccagctctataacgagctcaatctaggacgaagagaggagtacgatgttttggacaagagacgtggccgggaccctgagatggggggaaagccgagaaggaagaaccctcaggaaggcctgtacaatgaactgcagaaagataagatggcggaggcctacagtgagattgggatgaaaggcgagcgccggaggggcaaggggcacgatggcctttaccagggtctcagtacagccaccaaggacacctacgacgcccttcacatgcaggccctgccccctcgcggctctggcgagggaaggggttccctgcttacttgcggcgacgtcgaagagaatcccggtccgatggccctcccagtaactgccctccttttgcccctcgcactccttcttcatgccgctcgccccaactgggtcaacgtgattagcgatttgaagaaaatcgaggaccttatacagtctatgcatattgacgctacactgtatactgagagtgatgtacacccgtcctgtaaggtaacggccatgaaatgctttcttctggagctccaggtcatcagcttggagtctggggacgcaagcatccacgatacggttgaaaacctcatcatccttgcgaacaactctctctcatctaatggaaacgttacagagagtgggtgtaaggagtgcgaagagttggaagaaaaaaacatcaaagaatttcttcaatccttcgttcacatagtgcaaatgttcattaacacgtccactaccacacccgccccgaggccacctacgccggcaccgactatcgccagtcaacccctctctctgcgccccgaggcttgccggcctgcggctggtggggcggtccacacccggggcctggattttgcgtgcgatatatacatctgggcacctcttgccggcacctgcggagtgctgcttctctcactcgttattacgctgtactgctaa

SEQ ID NO: 369 - DNA, 2166 bp, synthetic construct
  source 1..2166: mol_type = other DNA
atggccttaccagtgaccgccttgctcctgccgctggccttgctgctccacgccgccaggccggactacaaagacgatgacgataaaggcggtggtggctctggtggtggcggatcccaggtgcagctggtgcagtctggggctgaggtgaagaagcctggggcctcagtgaaggtctcctgcaaggcttctggatacaccttcaccagttattatatccactgggtgcgacaggccccgggacaagggcttgagtggatgggatggatgaacccaaacagtggtaacgccggctatgcacagaagttccagggcagagtcaccatgaccagggatacctccacaagcacagtgtacatggagctgagcagcctgagatctgaggacacggccgtgtattactgtgcgagagagtactgggggagctttgactactggggccaagggaccctggtcaccgtctcctcaggtggaggcggttcaggcggaggtggctctggcggtggcggatcggacatccagatgacccagtctccatcctccctgtctgcatctgtaggagacagagtcaccatcacttgccgggcaagtcaggggattagcaataacttaaattggtatcagcagaaaccagggaaagcccctaagctcctgatctatgatgcatccaacttggaaactggggtcccatcaaggttcagtggcagtggatctgggacagatttcactctcaccatcagcagtctgcaacctgaagattttgcaacttactactgtcaacagagttacagtaccccttatacgttcggccaagggaccaaggtggaaatcaaaaccacgacgccagcgccgcggccaccaacaccggcgcccaccatcgcgtcgcagcccctgtccctgcgcccagaggcgtgccggccagcggcggggggcgcagtgcacacgagggggctggacttcgcctgtgatatctacatctgggcgcccttggccgggacttgtggggtccttctcctgtcactggttatcaccctttactgccggagggaccagaggctgccccccgatgcccacaagccccctgggggaggcagtttccggacccccatccaagaggagcaggccgacgcccactccaccctggccaagatcagagtgaagttcagcaggagcgcagacgcccccgcgtaccagcagggccagaaccagctctataacgagctcaatctaggacgaagagaggagtacgatgttttggacaagagacgtggccgggaccctgagatggggggaaagccgagaaggaagaaccctcaggaaggcctgtacaatgaactgcagaaagataagatggcggaggcctacagtgagattgggatgaaaggcgagcgccggaggggcaaggggcacgatggcctttaccagggtctcagtacagccaccaaggacacctacgacgcccttcacatgcaggccctgccccctcgcggctctggcgagggaaggggttccctgcttacttgcggcgacgtcgaagagaatcccggtccgatggccctcccagtaactgccctccttttgcccctcgcactccttcttcatgccgctcgccccaactgggtcaacgtgattagcgatttgaagaaaatcgaggaccttatacagtctatgcatattgacgctacactgtatactgagagtgatgtacacccgtcctgtaaggtaacggccatgaaatgctttcttctggagctccaggtcatcagcttggagtctggggacgcaagcatccacgatacggttgaaaacctcatcatccttgcgaacaactctctctcatctaatggaaacgttacagagagtgggtgtaaggagtgcgaagagttggaagaaaaaaacatcaaagaatttcttcaatccttcgttcacatagtgcaaatgttcattaacacgtccactaccacacccgccccgaggccacctacgccggcaccgactatcgccagtcaacccctctctctgcgccccgaggcttgccggcctgcggctggtggggcggtccacacccggggcctggattttgcgtgcgatatatacatctgggcacctcttgccggcacctgcggagtgctgcttctctcactcgttattacgctgtactgctaa

SEQ ID NO: 370 - DNA, 2169 bp, synthetic construct
  source 1..2169: mol_type = other DNA
atggccttaccagtgaccgccttgctcctgccgctggccttgctgctccacgccgccaggccggactacaaagacgatgacgataaaggcggtggtggctctggtggtggcggatcccaggtgcagctggtgcagtctggggctgaggtgaagaagcctggggcctcagtgaaggtttcctgcaaggcatctggatacaccttcaccggctactatatgcactgggtgcgacaggcccctggacaagggcttgagtggatgggaatgatcgatccaagcgacggtagcacaatttacgcacagaagttccagggcagagtcaccatgaccagggacacgtccacgagcacagtctacatggagctgagcagcctgagatctgaggacacggccgtgtattactgtgctagagagcggccactgtacgcttccgacctgtggggccaagggaccctggtcaccgtctcctcaggtggaggcggttcaggcggaggtggctctggcggtggcggatcggatatccagatgacccagtctccatcctccctgtctgcatctgtaggagacagagtcaccatcacttgccgggcaagtcaggacattggaaatgatttaggctggtatcagcagaaaccagggaaagcccctaagctcctgatctatgctgcatccagtttacaaagtggggtcccatcaaggttcagcggcagtggatctggcacagatttcactctcaccatcagcagcctgcagcctgaagattttgcaacttattactgtctacaagattacgactaccctctcactttcggccaggggaccaaggtggagatcaaaaccacgacgccagcgccgcggccaccaacaccggcgcccaccatcgcgtcgcagcccctgtccctgcgcccagaggcgtgccggccagcggcggggggcgcagtgcacacgagggggctggacttcgcctgtgatatctacatctgggcgcccttggccgggacttgtggggtccttctcctgtcactggttatcaccctttactgccggagggaccagaggctgccccccgatgcccacaagccccctgggggaggcagtttccggacccccatccaagaggagcaggccgacgcccactccaccctggccaagatcagagtgaagttcagcaggagcgcagacgcccccgcgtaccagcagggccagaaccagctctataacgagctcaatctaggacgaagagaggagtacgatgttttggacaagagacgtggccgggaccctgagatggggggaaagccgagaaggaagaaccctcaggaaggcctgtacaatgaactgcagaaagataagatggcggaggcctacagtgagattgggatgaaaggcgagcgccggaggggcaaggggcacgatggcctttaccagggtctcagtacagccaccaaggacacctacgacgcccttcacatgcaggccctgccccctcgcggctctggcgagggaaggggttccctgcttacttgcggcgacgtcgaagagaatcccggtccgatggccctcccagtaactgccctccttttgcccctcgcactccttcttcatgccgctcgccccaactgggtcaacgtgattagcgatttgaagaaaatcgaggaccttatacagtctatgcatattgacgctacactgtatactgagagtgatgtacacccgtcctgtaaggtaacggccatgaaatgctttcttctggagctccaggtcatcagcttggagtctggggacgcaagcatccacgatacggttgaaaacctcatcatccttgcgaacaactctctctcatctaatggaaacgttacagagagtgggtgtaaggagtgcgaagagttggaagaaaaaaacatcaaagaatttcttcaatccttcgttcacatagtgcaaatgttcattaacacgtccactaccacacccgccccgaggccacctacgccggcaccgactatcgccagtcaacccctctctctgcgccccgaggcttgccggcctgcggctggtggggcggtccacacccggggcctggattttgcgtgcgatatatacatctgggcacctcttgccggcacctgcggagtgctgcttctctcactcgttattacgctgtactgctaa

SEQ ID NO: 371 - DNA, 2172 bp, synthetic construct
  source 1..2172: mol_type = other DNA
atggccttaccagtgaccgccttgctcctgccgctggccttgctgctccacgccgccaggccggactacaaagacgatgacgataaaggcggtggtggctctggtggtggcggatcccaggtgcagctggtgcagtctggggctgaggtgaagaagcctgggtcttcagtgaaggtttcctgcaaggcatctggatacaccttcaccaactactatatgcactgggtgcgacaggcccctggacaagggcttgagtggatgggatggatgaaccccgatagtggtaatacagggtacgcacagaagttccagggcagagtcaccatcaccgctgacgaatccacgagcacagcctacatggagctgagcagcctgagatctgaggacacggccgtgtattactgtgctagaagtagcagctcctggcctgacttcgatctctggggccgtggcaccctggtcactgtctcctcaggtggaggcggttcaggcggaggtggctctggcggtggcggatcggacatccagatgacccagtctccatcctccctgtctgcatctgtaggagacagagtcaccatcacttgccgggcaagtcagagcattagcagctatttaaattggtatcagcagaaaccagggaaagcccctaagctcctgatctatgatgcatccaacttggagactggggtcccatcaaggttcagtggcagtggatctgggacagatttcactctcaccatcagcagtctgcaacctgaagattttgcaacttactactgtcaacagagttacaacaccccttacagttttggccaggggaccaaggtggagatcaaaaccacgacgccagcgccgcggccaccaacaccggcgcccaccatcgcgtcgcagcccctgtccctgcgcccagaggcgtgccggccagcggcggggggcgcagtgcacacgagggggctggacttcgcctgtgatatctacatctgggcgcccttggccgggacttgtggggtccttctcctgtcactggttatcaccctttactgccggagggaccagaggctgccccccgatgcccacaagccccctgggggaggcagtttccggacccccatccaagaggagcaggccgacgcccactccaccctggccaagatcagagtgaagttcagcaggagcgcagacgcccccgcgtaccagcagggccagaaccagctctataacgagctcaatctaggacgaagagaggagtacgatgttttggacaagagacgtggccgggaccctgagatggggggaaagccgagaaggaagaaccctcaggaaggcctgtacaatgaactgcagaaagataagatggcggaggcctacagtgagattgggatgaaaggcgagcgccggaggggcaaggggcacgatggcctttaccagggtctcagtacagccaccaaggacacctacgacgcccttcacatgcaggccctgccccctcgcggctctggcgagggaaggggttccctgcttacttgcggcgacgtcgaagagaatcccggtccgatggccctcccagtaactgccctccttttgcccctcgcactccttcttcatgccgctcgccccaactgggtcaacgtgattagcgatttgaagaaaatcgaggaccttatacagtctatgcatattgacgctacactgtatactgagagtgatgtacacccgtcctgtaaggtaacggccatgaaatgctttcttctggagctccaggtcatcagcttggagtctggggacgcaagcatccacgatacggttgaaaacctcatcatccttgcgaacaactctctctcatctaatggaaacgttacagagagtgggtgtaaggagtgcgaagagttggaagaaaaaaacatcaaagaatttcttcaatccttcgttcacatagtgcaaatgttcattaacacgtccactaccacacccgccccgaggccacctacgccggcaccgactatcgccagtcaacccctctctctgcgccccgaggcttgccggcctgcggctggtggggcggtccacacccggggcctggattttgcgtgcgatatatacatctgggcacctcttgccggcacctgcggagtgctgcttctctcactcgttattacgctgtactgctaa

SEQ ID NO: 372 - DNA, 2175 bp, synthetic construct
  source 1..2175: mol_type = other DNA
atggccttaccagtgaccgccttgctcctgccgctggccttgctgctccacgccgccaggccggactacaaagacgatgacgataaaggcggtggtggctctggtggtggcggatcccaggtccaactcgtacaatccggcgcagaagtcaaaaaacccggcgcaagcgtcaaggtatcatgtaaagctagcgggtatacatttacatcctattccatgcattgggtacgccaagctccaggccagggcctggaatgggtcggtatcattaatcccagttccggctctgccagttatgcgcaaaaatttcaaggaagggtgacaatgactcgagataccagtacctccactgtgtatatggaactgtcctcactaaggagcgaagatactgctgtatactactgcgcacgcgaacgtggggcctatagtagtaccttcgactattggggtcagggcacgttagtgacagtgtcttccggtggaggcggttcaggcggaggtggctctggcggtggcggatcggacatccagatgacccagtctccatcctccctgtctgcatctgtaggagacagagtcaccatcacttgccggacaagtcagagcattagcagctatttaaattggtatcagcagaaaccagggaaagcccctaagctcctgatctatgacgcatccaatttggaaaccggggtcccatcaaggttcagtggcagtggatctgggacagatttcactctcaccatcagcagtctgcaacctgaagattttgcaacttactactgtcttcaggactacagttaccctctcactttcggccaagggaccaaggtggagatcaaaaccacgacgccagcgccgcggccaccaacaccggcgcccaccatcgcgtcgcagcccctgtccctgcgcccagaggcgtgccggccagcggcggggggcgcagtgcacacgagggggctggacttcgcctgtgatatctacatctgggcgcccttggccgggacttgtggggtccttctcctgtcactggttatcaccctttactgccggagggaccagaggctgccccccgatgcccacaagccccctgggggaggcagtttccggacccccatccaagaggagcaggccgacgcccactccaccctggccaagatcagagtgaagttcagcaggagcgcagacgcccccgcgtaccagcagggccagaaccagctctataacgagctcaatctaggacgaagagaggagtacgatgttttggacaagagacgtggccgggaccctgagatggggggaaagccgagaaggaagaaccctcaggaaggcctgtacaatgaactgcagaaagataagatggcggaggcctacagtgagattgggatgaaaggcgagcgccggaggggcaaggggcacgatggcctttaccagggtctcagtacagccaccaaggacacctacgacgcccttcacatgcaggccctgccccctcgcggctctggcgagggaaggggttccctgcttacttgcggcgacgtcgaagagaatcccggtccgatggccctcccagtaactgccctccttttgcccctcgcactccttcttcatgccgctcgccccaactgggtcaacgtgattagcgatttgaagaaaatcgaggaccttatacagtctatgcatattgacgctacactgtatactgagagtgatgtacacccgtcctgtaaggtaacggccatgaaatgctttcttctggagctccaggtcatcagcttggagtctggggacgcaagcatccacgatacggttgaaaacctcatcatccttgcgaacaactctctctcatctaatggaaacgttacagagagtgggtgtaaggagtgcgaagagttggaagaaaaaaacatcaaagaatttcttcaatccttcgttcacatagtgcaaatgttcattaacacgtccactaccacacccgccccgaggccacctacgccggcaccgactatcgccagtcaacccctctctctgcgccccgaggcttgccggcctgcggctggtggggcggtccacacccggggcctggattttgcgtgcgatatatacatctgggcacctcttgccggcacctgcggagtgctgcttctctcactcgttattacgctgtactgctaa

SEQ ID NO: 373 - DNA, 2175 bp, synthetic construct
  source 1..2175: mol_type = other DNA
atggccttaccagtgaccgccttgctcctgccgctggccttgctgctccacgccgccaggccggactacaaagacgatgacgataaaggcggtggtggctctggtggtggcggatcccaggtgcagctggtgcagtctggggctgaggtgaagaagcctggggcctcagtgaaggtttcctgcaaggcatctggatacaccttcaccgactactatatgcactgggtgcgacaggcccctggacaagggcttgagtggatgggagtcatcaacccctctgatggtacagctcattacgcacagcggctgcagggcagagtcaccatgaccagggacacgtccacgagcacagtctacatggagctgagcagcctgagatctgaggacacggccgtgtattactgtgctagagacagcggatcttactacgctgactttgactactggggccaagggaccctggtcaccgtctcctcaggtggaggcggttcaggcggaggtggctctggcggtggcggatcggacatccagatgacccagtctccatcctccctgtctgcatctgtaggagacagagtcaccatcacttgccaggcaagtcaggacattagcaattatttaaattggtatcagcagaaaccagggaaagcccctaagctcctgatctatgatgcatccagtttgcaaagtggggtcccatcaaggttcagtggcagtggatctgggacagatttcactctcaccatcagcagtctgcaacctgaagattttgcaacttactactgtcaacagagttacagtacccctcccgccttcggccaagggaccaaggtggaaatcaaaaccacgacgccagcgccgcggccaccaacaccggcgcccaccatcgcgtcgcagcccctgtccctgcgcccagaggcgtgccggccagcggcggggggcgcagtgcacacgagggggctggacttcgcctgtgatatctacatctgggcgcccttggccgggacttgtggggtccttctcctgtcactggttatcaccctttactgccggagggaccagaggctgccccccgatgcccacaagccccctgggggaggcagtttccggacccccatccaagaggagcaggccgacgcccactccaccctggccaagatcagagtgaagttcagcaggagcgcagacgcccccgcgtaccagcagggccagaaccagctctataacgagctcaatctaggacgaagagaggagtacgatgttttggacaagagacgtggccgggaccctgagatggggggaaagccgagaaggaagaaccctcaggaaggcctgtacaatgaactgcagaaagataagatggcggaggcctacagtgagattgggatgaaaggcgagcgccggaggggcaaggggcacgatggcctttaccagggtctcagtacagccaccaaggacacctacgacgcccttcacatgcaggccctgccccctcgcggctctggcgagggaaggggttccctgcttacttgcggcgacgtcgaagagaatcccggtccgatggccctcccagtaactgccctccttttgcccctcgcactccttcttcatgccgctcgccccaactgggtcaacgtgattagcgatttgaagaaaatcgaggaccttatacagtctatgcatattgacgctacactgtatactgagagtgatgtacacccgtcctgtaaggtaacggccatgaaatgctttcttctggagctccaggtcatcagcttggagtctggggacgcaagcatccacgatacggttgaaaacctcatcatccttgcgaacaactctctctcatctaatggaaacgttacagagagtgggtgtaaggagtgcgaagagttggaagaaaaaaacatcaaagaatttcttcaatccttcgttcacatagtgcaaatgttcattaacacgtccactaccacacccgccccgaggccacctacgccggcaccgactatcgccagtcaacccctctctctgcgccccgaggcttgccggcctgcggctggtggggcggtccacacccggggcctggattttgcgtgcgatatatacatctgggcacctcttgccggcacctgcggagtgctgcttctctcactcgttattacgctgtactgctaa

SEQ ID NO: 374 - DNA, 2970 bp, synthetic construct
  source 1..2970: mol_type = other DNA
atggccttaccagtgaccgccttgctcctgccgctggccttgctgctccacgccgccaggccggactacaaagacgatgacgataaaggcggtggtggctctggtggtggcggatcccaggtgcagctggtgcagtctggggctgaggtgaagaagcctggggcctcagtgaaggtttcctgcaaggcatctggatacagtttcaccagctactatatgcactgggtgcgacaggcccctggacaagggcttgagtggatgggaataatcaaccctagtggtgggactacaagctacgcacagaagttccagggcagagtcaccatgaccagggacacgtccacgagcacagtctacatggagctgagcagcctgagatctgaggacacggccgtgtattactgtgctagagacaattccccgtatagctcaagctggtgggactactttgactactggggccaagggaccctggtcaccgtctcctcaggtggaggcggttcaggcggaggtggctctggcggtggcggatcggacatccagatgacccagtctccatcctccctgtctgcatctgtaggagacagagtcaccatcacttgccgggcaagtcaggacattcggcattatttagcatggtatcagcagaaaccagggaaagcccctaagctcctgatctatgacgcatccagtttgcaaagtggggtcccatcaaggttcagtggcagtggatctgggacagatttcactctcaccatcagcagtctgcaacctgaagattttgcaacttactactgtcaacagacctacgacgcacctatcaccttcggccaagggacacgactggagattaaaggtggcggtggctcgggcggtggtgggtcgggtggcggcggatctcaggtgcagctggtgcagtctggggctgaggtgaagaagcctggggcctcagtgaaggtttcctgcaaggcatctggatacagtttcaccagctactatatgcactgggtgcgacaggcccctggacaagggcttgagtggatgggaataatcaaccctagtggtgggactacaagctacgcacagaagttccagggcagagtcaccatgaccagggacacgtccacgagcacagtctacatggagctgagcagcctgagatctgaggacacggccgtgtattactgtgctagagacaattccccgtatagctcaagctggtgggactactttgactactggggccaagggaccctggtcaccgtctcctcaggtggaggcggttcaggcggaggtggctctggcggtggcggatcggacatccagatgacccagtctccatcctccctgtctgcatctgtaggagacagagtcaccatcacttgccgggcaagtcaggacattcggcattatttagcatggtatcagcagaaaccagggaaagcccctaagctcctgatctatgacgcatccagtttgcaaagtggggtcccatcaaggttcagtggcagtggatctgggacagatttcactctcaccatcagcagtctgcaacctgaagattttgcaacttactactgtcaacagacctacgacgcacctatcaccttcggccaagggacacgactggagattaaaaccacgacgccagcgccgcggccaccaacaccggcgcccaccatcgcgtcgcagcccctgtccctgcgcccagaggcgtgccggccagcggcggggggcgcagtgcacacgagggggctggacttcgcctgtgatatctacatctgggcgcccttggccgggacttgtggggtccttctcctgtcactggttatcaccctttactgccggagggaccagaggctgccccccgatgcccacaagccccctgggggaggcagtttccggacccccatccaagaggagcaggccgacgcccactccaccctggccaagatcagagtgaagttcagcaggagcgcagacgcccccgcgtaccagcagggccagaaccagctctataacgagctcaatctaggacgaagagaggagtacgatgttttggacaagagacgtggccgggaccctgagatggggggaaagccgagaaggaagaaccctcaggaaggcctgtacaatgaactgcagaaagataagatggcggaggcctacagtgagattgggatgaaaggcgagcgccggaggggcaaggggcacgatggcctttaccagggtctcagtacagccaccaaggacacctacgacgcccttcacatgcaggccctgccccctcgcggctctggcgagggaaggggttccctgcttacttgcggcgacgtcgaagagaatcccggtccgatggccctcccagtaactgccctccttttgcccctcgcactccttcttcatgccgctcgccccaactgggtcaacgtgattagcgatttgaagaaaatcgaggaccttatacagtctatgcatattgacgctacactgtatactgagagtgatgtacacccgtcctgtaaggtaacggccatgaaatgctttcttctggagctccaggtcatcagcttggagtctggggacgcaagcatccacgatacggttgaaaacctcatcatccttgcgaacaactctctctcatctaatggaaacgttacagagagtgggtgtaaggagtgcgaagagttggaagaaaaaaacatcaaagaatttcttcaatccttcgttcacatagtgcaaatgttcattaacacgtccactaccacacccgccccgaggccacctacgccggcaccgactatcgccagtcaacccctctctctgcgccccgaggcttgccggcctgcggctggtggggcggtccacacccggggcctggattttgcgtgcgatatatacatctgggcacctcttgccggcacctgcggagtgctgcttctctcactcgttattacgctgtactgctaa

SEQ ID NO: 375 - DNA, 2970 bp, synthetic construct
  source 1..2970: mol_type = other DNA
atggccttaccagtgaccgccttgctcctgccgctggccttgctgctccacgccgccaggccggactacaaagacgatgacgataaaggcggtggtggctctggtggtggcggatcccaggtgcagctggtgcagtctggggctgaggtgaagaagcctgggtcctcggtgaaggtctcctgcaaggcttctggatacaccttcaccagctatggaatcagctgggtgcgacaggcccctggacaagggcttgagtggatgggaggtatcatccctatctttggtacaacgaactacgcacagaagttccagggcagagtcacgattaccgcggacgaatccacgagcacagcctacatggagctgagcagcctgagatctgaggacacggccgtgtattactgtgcgagagatcatagcggcgatgggtacttcgatctctggggccgtggcaccctggtcactgtctcctcaggtggaggcggttcaggcggaggtggctctggcggtggcggatcggatattgtgatgactcagtctccactctccctgcccgtcacccctggagagccggcctccatctcctgcaggtctagtcagagcctcctgcactccaacggatacaactatttggattggtacctgcagaagccagggcagtctccacagctcctgatctatgatgcctcttcacttcagtccggggtccctgacaggttcagtggcagtggatcaggcacagattttacactgaaaatcagcagagtggaggctgaggatgttggggtttattactgcatgcaaggaacacactggcctcccacgttcggccaagggaccaaggtggaaatcaaaggtggcggtggctcgggcggtggtgggtcgggtggcggcggatctcaggtgcagctggtgcagtctggggctgaggtgaagaagcctgggtcctcggtgaaggtctcctgcaaggcttctggatacaccttcaccagctatggaatcagctgggtgcgacaggcccctggacaagggcttgagtggatgggaggtatcatccctatctttggtacaacgaactacgcacagaagttccagggcagagtcacgattaccgcggacgaatccacgagcacagcctacatggagctgagcagcctgagatctgaggacacggccgtgtattactgtgcgagagatcatagcggcgatgggtacttcgatctctggggccgtggcaccctggtcactgtctcctcaggtggaggcggttcaggcggaggtggctctggcggtggcggatcggatattgtgatgactcagtctccactctccctgcccgtcacccctggagagccggcctccatctcctgcaggtctagtcagagcctcctgcactccaacggatacaactatttggattggtacctgcagaagccagggcagtctccacagctcctgatctatgatgcctcttcacttcagtccggggtccctgacaggttcagtggcagtggatcaggcacagattttacactgaaaatcagcagagtggaggctgaggatgttggggtttattactgcatgcaaggaacacactggcctcccacgttcggccaagggaccaaggtggaaatcaaaaccacgacgccagcgccgcggccaccaacaccggcgcccaccatcgcgtcgcagcccctgtccctgcgcccagaggcgtgccggccagcggcggggggcgcagtgcacacgagggggctggacttcgcctgtgatatctacatctgggcgcccttggccgggacttgtggggtccttctcctgtcactggttatcaccctttactgccggagggaccagaggctgccccccgatgcccacaagccccctgggggaggcagtttccggacccccatccaagaggagcaggccgacgcccactccaccctggccaagatcagagtgaagttcagcaggagcgcagacgcccccgcgtaccagcagggccagaaccagctctataacgagctcaatctaggacgaagagaggagtacgatgttttggacaagagacgtggccgggaccctgagatggggggaaagccgagaaggaagaaccctcaggaaggcctgtacaatgaactgcagaaagataagatggcggaggcctacagtgagattgggatgaaaggcgagcgccggaggggcaaggggcacgatggcctttaccagggtctcagtacagccaccaaggacacctacgacgcccttcacatgcaggccctgccccctcgcggctctggcgagggaaggggttccctgcttacttgcggcgacgtcgaagagaatcccggtccgatggccctcccagtaactgccctccttttgcccctcgcactccttcttcatgccgctcgccccaactgggtcaacgtgattagcgatttgaagaaaatcgaggaccttatacagtctatgcatattgacgctacactgtatactgagagtgatgtacacccgtcctgtaaggtaacggccatgaaatgctttcttctggagctccaggtcatcagcttggagtctggggacgcaagcatccacgatacggttgaaaacctcatcatccttgcgaacaactctctctcatctaatggaaacgttacagagagtgggtgtaaggagtgcgaagagttggaagaaaaaaacatcaaagaatttcttcaatccttcgttcacatagtgcaaatgttcattaacacgtccactaccacacccgccccgaggccacctacgccggcaccgactatcgccagtcaacccctctctctgcgccccgaggcttgccggcctgcggctggtggggcggtccacacccggggcctggattttgcgtgcgatatatacatctgggcacctcttgccggcacctgcggagtgctgcttctctcactcgttattacgctgtactgctaa

SEQ ID NO: 376 - DNA, 2934 bp, synthetic construct
  source 1..2934: mol_type = other DNA
atggccttaccagtgaccgccttgctcctgccgctggccttgctgctccacgccgccaggccggactacaaagacgatgacgataaaggcggtggtggctctggtggtggcggatcccaggtgcagctggtgcagtctggggctgaggtgaagaagcctggggcctcagtgaaggtctcctgcaaggcttctggatacaccttcaccgagaatgagatgcactgggtgcgacaggcccctggacaagggcttgagtggatgggatggatcaacccgaacagtggtggcacaaactatgcacagaagtttcagggcagggtcaccatgaccagggacacgtccactagcacagtgtacatggagctgagctctctgagatctgaagacacggccgtgtattactgtgcggggagctggggtggttactactttgactactggggccaagggaccctggtcaccgtctcctcaggtggaggcggttcaggcggaggtggctctggcggtggcggatcggacatccagatgacccagtctccatcctccctgtctgcatctgtaggagacagagtcaccatcacttgccgggcaagtcagagcgttagcagatatttaaattggtatcagcagaaaccagggaaagcccctaagctcctgatctatgatgcatccaatttggaaaccggggtcccatcaaggttcagtggcagtggatctgggacagatttcactctcaccatcagcagtctgcaacctgaagattttgcaacttactactgtcaacaggccgacagtttccctgtgacttttggccaggggaccaagctggagatcaaaggtggcggtggctcgggcggtggtgggtcgggtggcggcggatctcaggtgcagctggtgcagtctggggctgaggtgaagaagcctggggcctcagtgaaggtctcctgcaaggcttctggatacaccttcaccgagaatgagatgcactgggtgcgacaggcccctggacaagggcttgagtggatgggatggatcaacccgaacagtggtggcacaaactatgcacagaagtttcagggcagggtcaccatgaccagggacacgtccactagcacagtgtacatggagctgagctctctgagatctgaagacacggccgtgtattactgtgcggggagctggggtggttactactttgactactggggccaagggaccctggtcaccgtctcctcaggtggaggcggttcaggcggaggtggctctggcggtggcggatcggacatccagatgacccagtctccatcctccctgtctgcatctgtaggagacagagtcaccatcacttgccgggcaagtcagagcgttagcagatatttaaattggtatcagcagaaaccagggaaagcccctaagctcctgatctatgatgcatccaatttggaaaccggggtcccatcaaggttcagtggcagtggatctgggacagatttcactctcaccatcagcagtctgcaacctgaagattttgcaacttactactgtcaacaggccgacagtttccctgtgacttttggccaggggaccaagctggagatcaaaaccacgacgccagcgccgcggccaccaacaccggcgcccaccatcgcgtcgcagcccctgtccctgcgcccagaggcgtgccggccagcggcggggggcgcagtgcacacgagggggctggacttcgcctgtgatatctacatctgggcgcccttggccgggacttgtggggtccttctcctgtcactggttatcaccctttactgccggagggaccagaggctgccccccgatgcccacaagccccctgggggaggcagtttccggacccccatccaagaggagcaggccgacgcccactccaccctggccaagatcagagtgaagttcagcaggagcgcagacgcccccgcgtaccagcagggccagaaccagctctataacgagctcaatctaggacgaagagaggagtacgatgttttggacaagagacgtggccgggaccctgagatggggggaaagccgagaaggaagaaccctcaggaaggcctgtacaatgaactgcagaaagataagatggcggaggcctacagtgagattgggatgaaaggcgagcgccggaggggcaaggggcacgatggcctttaccagggtctcagtacagccaccaaggacacctacgacgcccttcacatgcaggccctgccccctcgcggctctggcgagggaaggggttccctgcttacttgcggcgacgtcgaagagaatcccggtccgatggccctcccagtaactgccctccttttgcccctcgcactccttcttcatgccgctcgccccaactgggtcaacgtgattagcgatttgaagaaaatcgaggaccttatacagtctatgcatattgacgctacactgtatactgagagtgatgtacacccgtcctgtaaggtaacggccatgaaatgctttcttctggagctccaggtcatcagcttggagtctggggacgcaagcatccacgatacggttgaaaacctcatcatccttgcgaacaactctctctcatctaatggaaacgttacagagagtgggtgtaaggagtgcgaagagttggaagaaaaaaacatcaaagaatttcttcaatccttcgttcacatagtgcaaatgttcattaacacgtccactaccacacccgccccgaggccacctacgccggcaccgactatcgccagtcaacccctctctctgcgccccgaggcttgccggcctgcggctggtggggcggtccacacccggggcctggattttgcgtgcgatatatacatctgggcacctcttgccggcacctgcggagtgctgcttctctcactcgttattacgctgtactgctaa

SEQ ID NO: 377 - DNA, 2979 bp, synthetic construct
  source 1..2979: mol_type = other DNA
atggccttaccagtgaccgccttgctcctgccgctggccttgctgctccacgccgccaggccggactacaaagacgatgacgataaaggcggtggtggctctggtggtggcggatcccaggtgcagctggtgcagtctggggctgaggtgaagaagcctggggcctcagtgaaggtttcctgcaaggcatctggatacagtttcaccagctactatatgcactgggtgcgacaggcccctggacaagggcttgagtggatgggaataatcaaccctagtggtgggactacaagctacgcacagaagttccagggcagagtcaccatgaccagggacacgtccacgagcacagtctacatggagctgagcagcctgagatctgaggacacggccgtgtattactgtgctagagacaattccccgtatagctcaagctggtgggactactttgactactggggccaagggaccctggtcaccgtctcctcaggtggaggcggttcaggcggaggtggctctggcggtggcggatcggacatccagatgacccagtctccatcctccctgtctgcatctgtaggagacagagtcaccatcacttgccgggcaagtcaggacattcggcattatttagcatggtatcagcagaaaccagggaaagcccctaagctcctgatctatgacgcatccagtttgcaaagtggggtcccatcaaggttcagtggcagtggatctgggacagatttcactctcaccatcagcagtctgcaacctgaagattttgcaacttactactgtcaacagacctacgacgcacctatcaccttcggccaagggacacgactggagattaaaggtggcggtggctcgggcggtggtgggtcgggtggcggcggatctcaggtgcagctggtgcagtctggggctgaggtgaagaagcctgggtcctcggtgaaggtctcctgcaaggcttctggaggcaccttcagcagctatgctatcagctgggtgcgacaggcccctggacaagggcttgagtggatgggaggaatcacaccaatgtttggtacaacggactacgcacagaagttccagggcagagtcacgattaccgcggacgaatccacgagcacagcctacatggagctgagcagcctgagatctgaggacacggccgtgtattactgtgcgagagatgagcgggacggatacgccacagtggcttttgatatctggggccaagggacaatggtcaccgtctcttcaggtggaggcggttcaggcggaggtggctctggcggtggcggatcggatattgtgatgactcagtctccactctccctgcccgtcacccctggagagccggcctccatctcctgcaggtctagtcagagcctcctgcatagcaatggatacaactatttggattggtacctgcagaagccagggcagtctccacagctcctgatctatgatgcttctaatcttgagacaggggtccctgacaggttcagtggcagtggatcaggcacagattttacactgaaaatcagcagagtggaggctgaggatgttggggtttattactgcatgcaagggacgcattggcctcccacgttcggccaagggaccaaggtggaaatcaaaaccacgacgccagcgccgcggccaccaacaccggcgcccaccatcgcgtcgcagcccctgtccctgcgcccagaggcgtgccggccagcggcggggggcgcagtgcacacgagggggctggacttcgcctgtgatatctacatctgggcgcccttggccgggacttgtggggtccttctcctgtcactggttatcaccctttactgccggagggaccagaggctgccccccgatgcccacaagccccctgggggaggcagtttccggacccccatccaagaggagcaggccgacgcccactccaccctggccaagatcagagtgaagttcagcaggagcgcagacgcccccgcgtaccagcagggccagaaccagctctataacgagctcaatctaggacgaagagaggagtacgatgttttggacaagagacgtggccgggaccctgagatggggggaaagccgagaaggaagaaccctcaggaaggcctgtacaatgaactgcagaaagataagatggcggaggcctacagtgagattgggatgaaaggcgagcgccggaggggcaaggggcacgatggcctttaccagggtctcagtacagccaccaaggacacctacgacgcccttcacatgcaggccctgccccctcgcggctctggcgagggaaggggttccctgcttacttgcggcgacgtcgaagagaatcccggtccgatggccctcccagtaactgccctccttttgcccctcgcactccttcttcatgccgctcgccccaactgggtcaacgtgattagcgatttgaagaaaatcgaggaccttatacagtctatgcatattgacgctacactgtatactgagagtgatgtacacccgtcctgtaaggtaacggccatgaaatgctttcttctggagctccaggtcatcagcttggagtctggggacgcaagcatccacgatacggttgaaaacctcatcatccttgcgaacaactctctctcatctaatggaaacgttacagagagtgggtgtaaggagtgcgaagagttggaagaaaaaaacatcaaagaatttcttcaatccttcgttcacatagtgcaaatgttcattaacacgtccactaccacacccgccccgaggccacctacgccggcaccgactatcgccagtcaacccctctctctgcgccccgaggcttgccggcctgcggctggtggggcggtccacacccggggcctggattttgcgtgcgatatatacatctgggcacctcttgccggcacctgcggagtgctgcttctctcactcgttattacgctgtactgctaa

SEQ ID NO: 378 - DNA, 2964 bp, synthetic construct
  source 1..2964: mol_type = other DNA
atggccttaccagtgaccgccttgctcctgccgctggccttgctgctccacgccgccaggccggactacaaagacgatgacgataaaggcggtggtggctctggtggtggcggatcccaggtgcagctggtgcagtctggggctgaggtgaagaagcctggggcctcagtgaaggtttcctgcaaggcatctggatacagtttcaccagctactatatgcactgggtgcgacaggcccctggacaagggcttgagtggatgggaataatcaaccctagtggtgggactacaagctacgcacagaagttccagggcagagtcaccatgaccagggacacgtccacgagcacagtctacatggagctgagcagcctgagatctgaggacacggccgtgtattactgtgctagagacaattccccgtatagctcaagctggtgggactactttgactactggggccaagggaccctggtcaccgtctcctcaggtggaggcggttcaggcggaggtggctctggcggtggcggatcggacatccagatgacccagtctccatcctccctgtctgcatctgtaggagacagagtcaccatcacttgccgggcaagtcaggacattcggcattatttagcatggtatcagcagaaaccagggaaagcccctaagctcctgatctatgacgcatccagtttgcaaagtggggtcccatcaaggttcagtggcagtggatctgggacagatttcactctcaccatcagcagtctgcaacctgaagattttgcaacttactactgtcaacagacctacgacgcacctatcaccttcggccaagggacacgactggagattaaaggtggcggtggctcgggcggtggtgggtcgggtggcggcggatctcaggtgcagctggtgcagtctggggctgaggtgaagaagcctggggcctcagtgaaggtttcctgcaaggcatctggatacaccttcaccagctactatatgcactgggtgcgacaggcccctggacaagggcttgagtggatgggaataatcaaccctagtgacggaggaacaagctacgcagacaagttccagggcagagtcaccatgaccagggacacgtccacgagcacagtctacatggagctgagcagcctgagatctgaggacacggccgtgtattactgtgctagagcgcttgcccccctgggatggggtgacggcatggatgtctggggccaagggacaacagtcaccgtctcttcaggtggaggcggttcaggcggaggtggctctggcggtggcggatcggacatccagatgacccagtctccatcctccctgtctgcatctgtaggagacagagtcaccatcacttgccaggcgagtcaggacattagcaactatttaaattggtatcagcagaaaccagggaaagcccctaagctcctgatctacgatgcatccaatttggaaacaggggtcccatcaaggttcagtggaagtggatctgggacagattttactctcaccatcagcagcctgcagcctgaagatttcgcaacatattactgtcaacagtcatatgatggacctatcaccttcggccaagggacacgactggagattaaaaccacgacgccagcgccgcggccaccaacaccggcgcccaccatcgcgtcgcagcccctgtccctgcgcccagaggcgtgccggccagcggcggggggcgcagtgcacacgagggggctggacttcgcctgtgatatctacatctgggcgcccttggccgggacttgtggggtccttctcctgtcactggttatcaccctttactgccggagggaccagaggctgccccccgatgcccacaagccccctgggggaggcagtttccggacccccatccaagaggagcaggccgacgcccactccaccctggccaagatcagagtgaagttcagcaggagcgcagacgcccccgcgtaccagcagggccagaaccagctctataacgagctcaatctaggacgaagagaggagtacgatgttttggacaagagacgtggccgggaccctgagatggggggaaagccgagaaggaagaaccctcaggaaggcctgtacaatgaactgcagaaagataagatggcggaggcctacagtgagattgggatgaaaggcgagcgccggaggggcaaggggcacgatggcctttaccagggtctcagtacagccaccaaggacacctacgacgcccttcacatgcaggccctgccccctcgcggctctggcgagggaaggggttccctgcttacttgcggcgacgtcgaagagaatcccggtccgatggccctcccagtaactgccctccttttgcccctcgcactccttcttcatgccgctcgccccaactgggtcaacgtgattagcgatttgaagaaaatcgaggaccttatacagtctatgcatattgacgctacactgtatactgagagtgatgtacacccgtcctgtaaggtaacggccatgaaatgctttcttctggagctccaggtcatcagcttggagtctggggacgcaagcatccacgatacggttgaaaacctcatcatccttgcgaacaactctctctcatctaatggaaacgttacagagagtgggtgtaaggagtgcgaagagttggaagaaaaaaacatcaaagaatttcttcaatccttcgttcacatagtgcaaatgttcattaacacgtccactaccacacccgccccgaggccacctacgccggcaccgactatcgccagtcaacccctctctctgcgccccgaggcttgccggcctgcggctggtggggcggtccacacccggggcctggattttgcgtgcgatatatacatctgggcacctcttgccggcacctgcggagtgctgcttctctcactcgttattacgctgtactgctaa

SEQ ID NO: 379 - DNA, 2979 bp, synthetic construct
  source 1..2979: mol_type = other DNA
atggccttaccagtgaccgccttgctcctgccgctggccttgctgctccacgccgccaggccggactacaaagacgatgacgataaaggcggtggtggctctggtggtggcggatcccaggtgcagctggtgcagtctggggctgaggtgaagaagcctgggtcctcggtgaaggtctcctgcaaggcttctggatacaccttcaccagctatggaatcagctgggtgcgacaggcccctggacaagggcttgagtggatgggaggtatcatccctatctttggtacaacgaactacgcacagaagttccagggcagagtcacgattaccgcggacgaatccacgagcacagcctacatggagctgagcagcctgagatctgaggacacggccgtgtattactgtgcgagagatcatagcggcgatgggtacttcgatctctggggccgtggcaccctggtcactgtctcctcaggtggaggcggttcaggcggaggtggctctggcggtggcggatcggatattgtgatgactcagtctccactctccctgcccgtcacccctggagagccggcctccatctcctgcaggtctagtcagagcctcctgcactccaacggatacaactatttggattggtacctgcagaagccagggcagtctccacagctcctgatctatgatgcctcttcacttcagtccggggtccctgacaggttcagtggcagtggatcaggcacagattttacactgaaaatcagcagagtggaggctgaggatgttggggtttattactgcatgcaaggaacacactggcctcccacgttcggccaagggaccaaggtggaaatcaaaggtggcggtggctcgggcggtggtgggtcgggtggcggcggatctcaggtgcagctggtgcagtctggggctgaggtgaagaagcctgggtcctcggtgaaggtctcctgcaaggcttctggaggcaccttcagcagctatgctatcagctgggtgcgacaggcccctggacaagggcttgagtggatgggaggaatcacaccaatgtttggtacaacggactacgcacagaagttccagggcagagtcacgattaccgcggacgaatccacgagcacagcctacatggagctgagcagcctgagatctgaggacacggccgtgtattactgtgcgagagatgagcgggacggatacgccacagtggcttttgatatctggggccaagggacaatggtcaccgtctcttcaggtggaggcggttcaggcggaggtggctctggcggtggcggatcggatattgtgatgactcagtctccactctccctgcccgtcacccctggagagccggcctccatctcctgcaggtctagtcagagcctcctgcatagcaatggatacaactatttggattggtacctgcagaagccagggcagtctccacagctcctgatctatgatgcttctaatcttgagacaggggtccctgacaggttcagtggcagtggatcaggcacagattttacactgaaaatcagcagagtggaggctgaggatgttggggtttattactgcatgcaagggacgcattggcctcccacgttcggccaagggaccaaggtggaaatcaaaaccacgacgccagcgccgcggccaccaacaccggcgcccaccatcgcgtcgcagcccctgtccctgcgcccagaggcgtgccggccagcggcggggggcgcagtgcacacgagggggctggacttcgcctgtgatatctacatctgggcgcccttggccgggacttgtggggtccttctcctgtcactggttatcaccctttactgccggagggaccagaggctgccccccgatgcccacaagccccctgggggaggcagtttccggacccccatccaagaggagcaggccgacgcccactccaccctggccaagatcagagtgaagttcagcaggagcgcagacgcccccgcgtaccagcagggccagaaccagctctataacgagctcaatctaggacgaagagaggagtacgatgttttggacaagagacgtggccgggaccctgagatggggggaaagccgagaaggaagaaccctcaggaaggcctgtacaatgaactgcagaaagataagatggcggaggcctacagtgagattgggatgaaaggcgagcgccggaggggcaaggggcacgatggcctttaccagggtctcagtacagccaccaaggacacctacgacgcccttcacatgcaggccctgccccctcgcggctctggcgagggaaggggttccctgcttacttgcggcgacgtcgaagagaatcccggtccgatggccctcccagtaactgccctccttttgcccctcgcactccttcttcatgccgctcgccccaactgggtcaacgtgattagcgatttgaagaaaatcgaggaccttatacagtctatgcatattgacgctacactgtatactgagagtgatgtacacccgtcctgtaaggtaacggccatgaaatgctttcttctggagctccaggtcatcagcttggagtctggggacgcaagcatccacgatacggttgaaaacctcatcatccttgcgaacaactctctctcatctaatggaaacgttacagagagtgggtgtaaggagtgcgaagagttggaagaaaaaaacatcaaagaatttcttcaatccttcgttcacatagtgcaaatgttcattaacacgtccactaccacacccgccccgaggccacctacgccggcaccgactatcgccagtcaacccctctctctgcgccccgaggcttgccggcctgcggctggtggggcggtccacacccggggcctggattttgcgtgcgatatatacatctgggcacctcttgccggcacctgcggagtgctgcttctctcactcgttattacgctgtactgctaa

SEQ ID NO: 380 - DNA, 2964 bp, synthetic construct
  source 1..2964: mol_type = other DNA
atggccttaccagtgaccgccttgctcctgccgctggccttgctgctccacgccgccaggccggactacaaagacgatgacgataaaggcggtggtggctctggtggtggcggatcccaggtgcagctggtgcagtctggggctgaggtgaagaagcctgggtcctcggtgaaggtctcctgcaaggcttctggatacaccttcaccagctatggaatcagctgggtgcgacaggcccctggacaagggcttgagtggatgggaggtatcatccctatctttggtacaacgaactacgcacagaagttccagggcagagtcacgattaccgcggacgaatccacgagcacagcctacatggagctgagcagcctgagatctgaggacacggccgtgtattactgtgcgagagatcatagcggcgatgggtacttcgatctctggggccgtggcaccctggtcactgtctcctcaggtggaggcggttcaggcggaggtggctctggcggtggcggatcggatattgtgatgactcagtctccactctccctgcccgtcacccctggagagccggcctccatctcctgcaggtctagtcagagcctcctgcactccaacggatacaactatttggattggtacctgcagaagccagggcagtctccacagctcctgatctatgatgcctcttcacttcagtccggggtccctgacaggttcagtggcagtggatcaggcacagattttacactgaaaatcagcagagtggaggctgaggatgttggggtttattactgcatgcaaggaacacactggcctcccacgttcggccaagggaccaaggtggaaatcaaaggtggcggtggctcgggcggtggtgggtcgggtggcggcggatctcaggtgcagctggtgcagtctggggctgaggtgaagaagcctggggcctcagtgaaggtttcctgcaaggcatctggatacaccttcaccagctactatatgcactgggtgcgacaggcccctggacaagggcttgagtggatgggaataatcaaccctagtgacggaggaacaagctacgcagacaagttccagggcagagtcaccatgaccagggacacgtccacgagcacagtctacatggagctgagcagcctgagatctgaggacacggccgtgtattactgtgctagagcgcttgcccccctgggatggggtgacggcatggatgtctggggccaagggacaacagtcaccgtctcttcaggtggaggcggttcaggcggaggtggctctggcggtggcggatcggacatccagatgacccagtctccatcctccctgtctgcatctgtaggagacagagtcaccatcacttgccaggcgagtcaggacattagcaactatttaaattggtatcagcagaaaccagggaaagcccctaagctcctgatctacgatgcatccaatttggaaacaggggtcccatcaaggttcagtggaagtggatctgggacagattttactctcaccatcagcagcctgcagcctgaagatttcgcaacatattactgtcaacagtcatatgatggacctatcaccttcggccaagggacacgactggagattaaaaccacgacgccagcgccgcggccaccaacaccggcgcccaccatcgcgtcgcagcccctgtccctgcgcccagaggcgtgccggccagcggcggggggcgcagtgcacacgagggggctggacttcgcctgtgatatctacatctgggcgcccttggccgggacttgtggggtccttctcctgtcactggttatcaccctttactgccggagggaccagaggctgccccccgatgcccacaagccccctgggggaggcagtttccggacccccatccaagaggagcaggccgacgcccactccaccctggccaagatcagagtgaagttcagcaggagcgcagacgcccccgcgtaccagcagggccagaaccagctctataacgagctcaatctaggacgaagagaggagtacgatgttttggacaagagacgtggccgggaccctgagatggggggaaagccgagaaggaagaaccctcaggaaggcctgtacaatgaactgcagaaagataagatggcggaggcctacagtgagattgggatgaaaggcgagcgccggaggggcaaggggcacgatggcctttaccagggtctcagtacagccaccaaggacacctacgacgcccttcacatgcaggccctgccccctcgcggctctggcgagggaaggggttccctgcttacttgcggcgacgtcgaagagaatcccggtccgatggccctcccagtaactgccctccttttgcccctcgcactccttcttcatgccgctcgccccaactgggtcaacgtgattagcgatttgaagaaaatcgaggaccttatacagtctatgcatattgacgctacactgtatactgagagtgatgtacacccgtcctgtaaggtaacggccatgaaatgctttcttctggagctccaggtcatcagcttggagtctggggacgcaagcatccacgatacggttgaaaacctcatcatccttgcgaacaactctctctcatctaatggaaacgttacagagagtgggtgtaaggagtgcgaagagttggaagaaaaaaacatcaaagaatttcttcaatccttcgttcacatagtgcaaatgttcattaacacgtccactaccacacccgccccgaggccacctacgccggcaccgactatcgccagtcaacccctctctctgcgccccgaggcttgccggcctgcggctggtggggcggtccacacccggggcctggattttgcgtgcgatatatacatctgggcacctcttgccggcacctgcggagtgctgcttctctcactcgttattacgctgtactgctaa

SEQ ID NO: 381 - DNA, 2961 bp, synthetic construct
  source 1..2961: mol_type = other DNA
atggccttaccagtgaccgccttgctcctgccgctggccttgctgctccacgccgccaggccggactacaaagacgatgacgataaaggcggtggtggctctggtggtggcggatcccaggtgcagctggtgcagtctggggctgaggtgaagaagcctggggcctcagtgaaggtctcctgcaaggcttctggatacaccttcaccgagaatgagatgcactgggtgcgacaggcccctggacaagggcttgagtggatgggatggatcaacccgaacagtggtggcacaaactatgcacagaagtttcagggcagggtcaccatgaccagggacacgtccactagcacagtgtacatggagctgagctctctgagatctgaagacacggccgtgtattactgtgcggggagctggggtggttactactttgactactggggccaagggaccctggtcaccgtctcctcaggtggaggcggttcaggcggaggtggctctggcggtggcggatcggacatccagatgacccagtctccatcctccctgtctgcatctgtaggagacagagtcaccatcacttgccgggcaagtcagagcgttagcagatatttaaattggtatcagcagaaaccagggaaagcccctaagctcctgatctatgatgcatccaatttggaaaccggggtcccatcaaggttcagtggcagtggatctgggacagatttcactctcaccatcagcagtctgcaacctgaagattttgcaacttactactgtcaacaggccgacagtttccctgtgacttttggccaggggaccaagctggagatcaaaggtggcggtggctcgggcggtggtgggtcgggtggcggcggatctcaggtgcagctggtgcagtctggggctgaggtgaagaagcctgggtcctcggtgaaggtctcctgcaaggcttctggaggcaccttcagcagctatgctatcagctgggtgcgacaggcccctggacaagggcttgagtggatgggaggaatcacaccaatgtttggtacaacggactacgcacagaagttccagggcagagtcacgattaccgcggacgaatccacgagcacagcctacatggagctgagcagcctgagatctgaggacacggccgtgtattactgtgcgagagatgagcgggacggatacgccacagtggcttttgatatctggggccaagggacaatggtcaccgtctcttcaggtggaggcggttcaggcggaggtggctctggcggtggcggatcggatattgtgatgactcagtctccactctccctgcccgtcacccctggagagccggcctccatctcctgcaggtctagtcagagcctcctgcatagcaatggatacaactatttggattggtacctgcagaagccagggcagtctccacagctcctgatctatgatgcttctaatcttgagacaggggtccctgacaggttcagtggcagtggatcaggcacagattttacactgaaaatcagcagagtggaggctgaggatgttggggtttattactgcatgcaagggacgcattggcctcccacgttcggccaagggaccaaggtggaaatcaaaaccacgacgccagcgccgcggccaccaacaccggcgcccaccatcgcgtcgcagcccctgtccctgcgcccagaggcgtgccggccagcggcggggggcgcagtgcacacgagggggctggacttcgcctgtgatatctacatctgggcgcccttggccgggacttgtggggtccttctcctgtcactggttatcaccctttactgccggagggaccagaggctgccccccgatgcccacaagccccctgggggaggcagtttccggacccccatccaagaggagcaggccgacgcccactccaccctggccaagatcagagtgaagttcagcaggagcgcagacgcccccgcgtaccagcagggccagaaccagctctataacgagctcaatctaggacgaagagaggagtacgatgttttggacaagagacgtggccgggaccctgagatggggggaaagccgagaaggaagaaccctcaggaaggcctgtacaatgaactgcagaaagataagatggcggaggcctacagtgagattgggatgaaaggcgagcgccggaggggcaaggggcacgatggcctttaccagggtctcagtacagccaccaaggacacctacgacgcccttcacatgcaggccctgccccctcgcggctctggcgagggaaggggttccctgcttacttgcggcgacgtcgaagagaatcccggtccgatggccctcccagtaactgccctccttttgcccctcgcactccttcttcatgccgctcgccccaactgggtcaacgtgattagcgatttgaagaaaatcgaggaccttatacagtctatgcatattgacgctacactgtatactgagagtgatgtacacccgtcctgtaaggtaacggccatgaaatgctttcttctggagctccaggtcatcagcttggagtctggggacgcaagcatccacgatacggttgaaaacctcatcatccttgcgaacaactctctctcatctaatggaaacgttacagagagtgggtgtaaggagtgcgaagagttggaagaaaaaaacatcaaagaatttcttcaatccttcgttcacatagtgcaaatgttcattaacacgtccactaccacacccgccccgaggccacctacgccggcaccgactatcgccagtcaacccctctctctgcgccccgaggcttgccggcctgcggctggtggggcggtccacacccggggcctggattttgcgtgcgatatatacatctgggcacctcttgccggcacctgcggagtgctgcttctctcactcgttattacgctgtactgctaa

SEQ ID NO: 382 - DNA, 2946 bp, synthetic construct
  source 1..2946: mol_type = other DNA
atggccttaccagtgaccgccttgctcctgccgctggccttgctgctccacgccgccaggccggactacaaagacgatgacgataaaggcggtggtggctctggtggtggcggatcccaggtgcagctggtgcagtctggggctgaggtgaagaagcctggggcctcagtgaaggtctcctgcaaggcttctggatacaccttcaccgagaatgagatgcactgggtgcgacaggcccctggacaagggcttgagtggatgggatggatcaacccgaacagtggtggcacaaactatgcacagaagtttcagggcagggtcaccatgaccagggacacgtccactagcacagtgtacatggagctgagctctctgagatctgaagacacggccgtgtattactgtgcggggagctggggtggttactactttgactactggggccaagggaccctggtcaccgtctcctcaggtggaggcggttcaggcggaggtggctctggcggtggcggatcggacatccagatgacccagtctccatcctccctgtctgcatctgtaggagacagagtcaccatcacttgccgggcaagtcagagcgttagcagatatttaaattggtatcagcagaaaccagggaaagcccctaagctcctgatctatgatgcatccaatttggaaaccggggtcccatcaaggttcagtggcagtggatctgggacagatttcactctcaccatcagcagtctgcaacctgaagattttgcaacttactactgtcaacaggccgacagtttccctgtgacttttggccaggggaccaagctggagatcaaaggtggcggtggctcgggcggtggtgggtcgggtggcggcggatctcaggtgcagctggtgcagtctggggctgaggtgaagaagcctggggcctcagtgaaggtttcctgcaaggcatctggatacaccttcaccagctactatatgcactgggtgcgacaggcccctggacaagggcttgagtggatgggaataatcaaccctagtgacggaggaacaagctacgcagacaagttccagggcagagtcaccatgaccagggacacgtccacgagcacagtctacatggagctgagcagcctgagatctgaggacacggccgtgtattactgtgctagagcgcttgcccccctgggatggggtgacggcatggatgtctggggccaagggacaacagtcaccgtctcttcaggtggaggcggttcaggcggaggtggctctggcggtggcggatcggacatccagatgacccagtctccatcctccctgtctgcatctgtaggagacagagtcaccatcacttgccaggcgagtcaggacattagcaactatttaaattggtatcagcagaaaccagggaaagcccctaagctcctgatctacgatgcatccaatttggaaacaggggtcccatcaaggttcagtggaagtggatctgggacagattttactctcaccatcagcagcctgcagcctgaagatttcgcaacatattactgtcaacagtcatatgatggacctatcaccttcggccaagggacacgactggagattaaaaccacgacgccagcgccgcggccaccaacaccggcgcccaccatcgcgtcgcagcccctgtccctgcgcccagaggcgtgccggccagcggcggggggcgcagtgcacacgagggggctggacttcgcctgtgatatctacatctgggcgcccttggccgggacttgtggggtccttctcctgtcactggttatcaccctttactgccggagggaccagaggctgccccccgatgcccacaagccccctgggggaggcagtttccggacccccatccaagaggagcaggccgacgcccactccaccctggccaagatcagagtgaagttcagcaggagcgcagacgcccccgcgtaccagcagggccagaaccagctctataacgagctcaatctaggacgaagagaggagtacgatgttttggacaagagacgtggccgggaccctgagatggggggaaagccgagaaggaagaaccctcaggaaggcctgtacaatgaactgcagaaagataagatggcggaggcctacagtgagattgggatgaaaggcgagcgccggaggggcaaggggcacgatggcctttaccagggtctcagtacagccaccaaggacacctacgacgcccttcacatgcaggccctgccccctcgcggctctggcgagggaaggggttccctgcttacttgcggcgacgtcgaagagaatcccggtccgatggccctcccagtaactgccctccttttgcccctcgcactccttcttcatgccgctcgccccaactgggtcaacgtgattagcgatttgaagaaaatcgaggaccttatacagtctatgcatattgacgctacactgtatactgagagtgatgtacacccgtcctgtaaggtaacggccatgaaatgctttcttctggagctccaggtcatcagcttggagtctggggacgcaagcatccacgatacggttgaaaacctcatcatccttgcgaacaactctctctcatctaatggaaacgttacagagagtgggtgtaaggagtgcgaagagttggaagaaaaaaacatcaaagaatttcttcaatccttcgttcacatagtgcaaatgttcattaacacgtccactaccacacccgccccgaggccacctacgccggcaccgactatcgccagtcaacccctctctctgcgccccgaggcttgccggcctgcggctggtggggcggtccacacccggggcctggattttgcgtgcgatatatacatctgggcacctcttgccggcacctgcggagtgctgcttctctcactcgttattacgctgtactgctaa

SEQ ID NO: 383 - protein, 722 aa, synthetic construct
MALPVTALLLPLALLLHAARPDYKDDDDKGGGGSGGGGSQVQLVQSGAEVKKPGASVKVSCKASGYTFTGHYLHWVRQAPGQGLEWMGWINPNSGGTNYAQKFQGRVTMTRDTSTSTVYMELSSLRSEDTAVYYCVRGSGWYDLDYWGQGTLVTVSSGGGGSGGGGSGGGGSDIQMTQSPSSLSASVGDRVTITCRASQNIGTYLAWYQQKPGKAPKLLIYDASNLETGVPSRFSGSGSGTDFTLTISSLQPEDFATYYCQQSYRIPLTFGQGTRLEIKTTTPAPRPPTPAPTIASQPLSLRPEACRPAAGGAVHTRGLDFACDIYIWAPLAGTCGVLLLSLVITLYCRRDQRLPPDAHKPPGGGSFRTPIQEEQADAHSTLAKIRVKFSRSADAPAYQQGQNQLYNELNLGRREEYDVLDKRRGRDPEMGGKPRRKNPQEGLYNELQKDKMAEAYSEIGMKGERRRGKGHDGLYQGLSTATKDTYDALHMQALPPRGSGEGRGSLLTCGDVEENPGPMALPVTALLLPLALLLHAARPNWVNVISDLKKIEDLIQSMHIDATLYTESDVHPSCKVTAMKCFLLELQVISLESGDASIHDTVENLIILANNSLSSNGNVTESGCKECEELEEKNIKEFLQSFVHIVQMFINTSTTTPAPRPPTPAPTIASQPLSLRPEACRPAAGGAVHTRGLDFACDIYIWAPLAGTCGVLLLSLVITLYC

SEQ ID NO: 384 - protein, 723 aa, synthetic construct
MALPVTALLLPLALLLHAARPDYKDDDDKGGGGSGGGGSQVQLVQSGAEVKKPGASVKVSCKASGYTFTNYYMHWVRQAPGQGLEWMGIINPSGGSTSYAQKFQGRVTMTRDTSTSTVYMELSSLRSEDTAVYYCARELGVAGYFDLWGRGTLVTVSSGGGGSGGGGSGGGGSDIQMTQSPSSLSASVGDRVTITCRASQRISNWLAWYQQKPGKAPKLLIYDASNLETGVPSRFSGSGSGTDFTLTISSLQPEDFATYYCQQTYSPPPTFGQGTKLEIKTTTPAPRPPTPAPTIASQPLSLRPEACRPAAGGAVHTRGLDFACDIYIWAPLAGTCGVLLLSLVITLYCRRDQRLPPDAHKPPGGGSFRTPIQEEQADAHSTLAKIRVKFSRSADAPAYQQGQNQLYNELNLGRREEYDVLDKRRGRDPEMGGKPRRKNPQEGLYNELQKDKMAEAYSEIGMKGERRRGKGHDGLYQGLSTATKDTYDALHMQALPPRGSGEGRGSLLTCGDVEENPGPMALPVTALLLPLALLLHAARPNWVNVISDLKKIEDLIQSMHIDATLYTESDVHPSCKVTAMKCFLLELQVISLESGDASIHDTVENLIILANNSLSSNGNVTESGCKECEELEEKNIKEFLQSFVHIVQMFINTSTTTPAPRPPTPAPTIASQPLSLRPEACRPAAGGAVHTRGLDFACDIYIWAPLAGTCGVLLLSLVITLYC

SEQ ID NO: 385 - protein, 732 aa, synthetic construct
MALPVTALLLPLALLLHAARPDYKDDDDKGGGGSGGGGSQVQLVQSGAEVKKPGASVKVSCKASGYTFTGYYIHWVRQAPGQGLEWMGIINPSGGSTSYAQKFQGRVTMTRDTSTSTVYMELSSLRSEDTAVYYCARDLSGIDGYIGFFDYWGQGTLVTVSSGGGGSGGGGSGGGGSDIVMTQSPLSLPVTPGEPASISCRSSQSLLHSNGYNYLDWYLQKPGQSPQLLIYAASSLQSGVPDRFSGSGSGTDFTLKISRVEAEDVGVYYCMQALQTPITFGQGTRLEIKTTTPAPRPPTPAPTIASQPLSLRPEACRPAAGGAVHTRGLDFACDIYIWAPLAGTCGVLLLSLVITLYCRRDQRLPPDAHKPPGGGSFRTPIQEEQADAHSTLAKIRVKFSRSADAPAYQQGQNQLYNELNLGRREEYDVLDKRRGRDPEMGGKPRRKNPQEGLYNELQKDKMAEAYSEIGMKGERRRGKGHDGLYQGLSTATKDTYDALHMQALPPRGSGEGRGSLLTCGDVEENPGPMALPVTALLLPLALLLHAARPNWVNVISDLKKIEDLIQSMHIDATLYTESDVHPSCKVTAMKCFLLELQVISLESGDASIHDTVENLIILANNSLSSNGNVTESGCKECEELEEKNIKEFLQSFVHIVQMFINTSTTTPAPRPPTPAPTIASQPLSLRPEACRPAAGGAVHTRGLDFACDIYIWAPLAGTCGVLLLSLVITLYC

SEQ ID NO: 386 - protein, 723 aa, synthetic construct
MALPVTALLLPLALLLHAARPDYKDDDDKGGGGSGGGGSQVQLVQSGAEVKKPGASVKVSCKASGGTFRSHVISWVRQAPGQGLEWMGIIDPSGGSTSYAQRFQGRVTMTRDTSTSTVYMELSSLRSEDTAVYYCAKDYTGLLGMDVWGQGTTVTVSSGGGGSGGGGSGGGGSDIQMTQSPSSLSASVGDRVTITCRASQDIDTYLAWYQQKPGKAPKLLIYAASSLQSGVPSRFSGSGSGTDFTLTISSLQPEDFATYYCQQSYTTPFTFGQGTKVEIKTTTPAPRPPTPAPTIASQPLSLRPEACRPAAGGAVHTRGLDFACDIYIWAPLAGTCGVLLLSLVITLYCRRDQRLPPDAHKPPGGGSFRTPIQEEQADAHSTLAKIRVKFSRSADAPAYQQGQNQLYNELNLGRREEYDVLDKRRGRDPEMGGKPRRKNPQEGLYNELQKDKMAEAYSEIGMKGERRRGKGHDGLYQGLSTATKDTYDALHMQALPPRGSGEGRGSLLTCGDVEENPGPMALPVTALLLPLALLLHAARPNWVNVISDLKKIEDLIQSMHIDATLYTESDVHPSCKVTAMKCFLLELQVISLESGDASIHDTVENLIILANNSLSSNGNVTESGCKECEELEEKNIKEFLQSFVHIVQMFINTSTTTPAPRPPTPAPTIASQPLSLRPEACRPAAGGAVHTRGLDFACDIYIWAPLAGTCGVLLLSLVITLYC

SEQ ID NO: 387 - protein, 723 aa, synthetic construct
MALPVTALLLPLALLLHAARPDYKDDDDKGGGGSGGGGSQVQLVQSGAEVKKPGASVKVSCKASGYTFIDYYIHWVRQAPGQGLEWMGWMNPNSGNTGYAQKFQGRVTMTRDTSTSTVYMELSSLRSEDTAVYYCARGLSGYDLDDYWGQGTLVTVSSGGGGSGGGGSGGGGSDIQMTQSPSSLSASVGDRVTITCQASQDISNYLNWYQQKPGKAPKLLIYDASSLESGVPSRFSGSGSGTDFTLTISSLQPEDFATYYCQQSYRSPLTFGGGTKVEIKTTTPAPRPPTPAPTIASQPLSLRPEACRPAAGGAVHTRGLDFACDIYIWAPLAGTCGVLLLSLVITLYCRRDQRLPPDAHKPPGGGSFRTPIQEEQADAHSTLAKIRVKFSRSADAPAYQQGQNQLYNELNLGRREEYDVLDKRRGRDPEMGGKPRRKNPQEGLYNELQKDKMAEAYSEIGMKGERRRGKGHDGLYQGLSTATKDTYDALHMQALPPRGSGEGRGSLLTCGDVEENPGPMALPVTALLLPLALLLHAARPNWVNVISDLKKIEDLIQSMHIDATLYTESDVHPSCKVTAMKCFLLELQVISLESGDASIHDTVENLIILANNSLSSNGNVTESGCKECEELEEKNIKEFLQSFVHIVQMFINTSTTTPAPRPPTPAPTIASQPLSLRPEACRPAAGGAVHTRGLDFACDIYIWAPLAGTCGVLLLSLVITLYC

SEQ ID NO: 388 - protein, 722 aa, synthetic construct
MALPVTALLLPLALLLHAARPDYKDDDDKGGGGSGGGGSQVQLVQSGAEVKKPGASVKVSCKASGYTFTSYYMHWVRQAPGQGLEWMGWINPNSGGTKYAHKFQGRVTMTRDTSTSTVYMELSSLRSEDTAVYYCARGLSGYDFDYWGQGTTVTVSSGGGGSGGGGSGGGGSDIQMTQSPSSLSASVGDRVTITCQASQDISNYLNWYQQKPGKAPKLLIYDASNLETGVPSRFSGSGSGTDFTLTISSLQPEDFATYYCQQAYRWPITFGQGTRLEIKTTTPAPRPPTPAPTIASQPLSLRPEACRPAAGGAVHTRGLDFACDIYIWAPLAGTCGVLLLSLVITLYCRRDQRLPPDAHKPPGGGSFRTPIQEEQADAHSTLAKIRVKFSRSADAPAYQQGQNQLYNELNLGRREEYDVLDKRRGRDPEMGGKPRRKNPQEGLYNELQKDKMAEAYSEIGMKGERRRGKGHDGLYQGLSTATKDTYDALHMQALPPRGSGEGRGSLLTCGDVEENPGPMALPVTALLLPLALLLHAARPNWVNVISDLKKIEDLIQSMHIDATLYTESDVHPSCKVTAMKCFLLELQVISLESGDASIHDTVENLIILANNSLSSNGNVTESGCKECEELEEKNIKEFLQSFVHIVQMFINTSTTTPAPRPPTPAPTIASQPLSLRPEACRPAAGGAVHTRGLDFACDIYIWAPLAGTCGVLLLSLVITLYC

SEQ ID NO: 389 - protein, 723 aa, synthetic construct
MALPVTALLLPLALLLHAARPDYKDDDDKGGGGSGGGGSQVQLVQSGAEVKKPGASVKVSCKASGYTFTGYYMHWVRQAPGQGLEWMGWMNPNSGNTGYAQKFQGRVTMTRDTSTSTVYMELSSLRSEDTAVYYCARGTDVYGDFDYWGQGTLVTVSSGGGGSGGGGSGGGGSDIQMTQSPSSLSASVGDRVTITCRASQSISSYLNWYQQKPGKAPKLLIYDASYLETGVPSRFSGSGSGTDFTLTISSLQPEDFATYYCQQSYTIPPTFGQGTKVEIKTTTPAPRPPTPAPTIASQPLSLRPEACRPAAGGAVHTRGLDFACDIYIWAPLAGTCGVLLLSLVITLYCRRDQRLPPDAHKPPGGGSFRTPIQEEQADAHSTLAKIRVKFSRSADAPAYQQGQNQLYNELNLGRREEYDVLDKRRGRDPEMGGKPRRKNPQEGLYNELQKDKMAEAYSEIGMKGERRRGKGHDGLYQGLSTATKDTYDALHMQALPPRGSGEGRGSLLTCGDVEENPGPMALPVTALLLPLALLLHAARPNWVNVISDLKKIEDLIQSMHIDATLYTESDVHPSCKVTAMKCFLLELQVISLESGDASIHDTVENLIILANNSLSSNGNVTESGCKECEELEEKNIKEFLQSFVHIVQMFINTSTTTPAPRPPTPAPTIASQPLSLRPEACRPAAGGAVHTRGLDFACDIYIWAPLAGTCGVLLLSLVITLYC

SEQ ID NO: 390 - protein, 730 aa, synthetic construct
MALPVTALLLPLALLLHAARPDYKDDDDKGGGGSGGGGSQVQLVQSGAEVKKPGSSVKVSCKASGYTFTENEMHWVRQAPGQGLEWMGGIIPIFGTANYAQKFQGRVTITADESTSTAYMELSSLRSEDTAVYYCAREGGTAMATGYYYYGMDVWGQGTTVTVSSGGGGSGGGGSGGGGSDIQMTQSPSSLSASVGDRVTITCQASQDISNYLNWYQQKPGKAPKLLIYDASNLETGVPSRFSGSGSGTDFTLTISSLQPEDFATYYCQQSYSTPLTFGQGTKVEIKTTTPAPRPPTPAPTIASQPLSLRPEACRPAAGGAVHTRGLDFACDIYIWAPLAGTCGVLLLSLVITLYCRRDQRLPPDAHKPPGGGSFRTPIQEEQADAHSTLAKIRVKFSRSADAPAYQQGQNQLYNELNLGRREEYDVLDKRRGRDPEMGGKPRRKNPQEGLYNELQKDKMAEAYSEIGMKGERRRGKGHDGLYQGLSTATKDTYDALHMQALPPRGSGEGRGSLLTCGDVEENPGPMALPVTALLLPLALLLHAARPNWVNVISDLKKIEDLIQSMHIDATLYTESDVHPSCKVTAMKCFLLELQVISLESGDASIHDTVENLIILANNSLSSNGNVTESGCKECEELEEKNIKEFLQSFVHIVQMFINTSTTTPAPRPPTPAPTIASQPLSLRPEACRPAAGGAVHTRGLDFACDIYIWAPLAGTCGVLLLSLVITLYC

SEQ ID NO: 391 - protein, 728 aa, synthetic construct
MALPVTALLLPLALLLHAARPDYKDDDDKGGGGSGGGGSQVQLVQSGAEVKKPGASVKVSCKASGYTFTENEMHWVRQAPGQGLEWMGWINSNGGYTGYALKFQGRVTMTRDTSTSTVYMELSSLRSEDTAVYYCARASNYGGHFDYWGQGTLVTVSSGGGGSGGGGSGGGGSDIVMTQSPLSLPVTPGEPASISCRSSQSLLHSNGYNYLDWYLQKPGQSPQLLIYQASSLESGVPDRFSGSGSGTDFTLKISRVEAEDVGVYYCMQGTHWPPTFGGGTKVEIKTTTPAPRPPTPAPTIASQPLSLRPEACRPAAGGAVHTRGLDFACDIYIWAPLAGTCGVLLLSLVITLYCRRDQRLPPDAHKPPGGGSFRTPIQEEQADAHSTLAKIRVKFSRSADAPAYQQGQNQLYNELNLGRREEYDVLDKRRGRDPEMGGKPRRKNPQEGLYNELQKDKMAEAYSEIGMKGERRRGKGHDGLYQGLSTATKDTYDALHMQALPPRGSGEGRGSLLTCGDVEENPGPMALPVTALLLPLALLLHAARPNWVNVISDLKKIEDLIQSMHIDATLYTESDVHPSCKVTAMKCFLLELQVISLESGDASIHDTVENLIILANNSLSSNGNVTESGCKECEELEEKNIKEFLQSFVHIVQMFINTSTTTPAPRPPTPAPTIASQPLSLRPEACRPAAGGAVHTRGLDFACDIYIWAPLAGTCGVLLLSLVITLYC

SEQ ID NO: 392 - protein, 723 aa, synthetic construct
MALPVTALLLPLALLLHAARPDYKDDDDKGGGGSGGGGSQVQLVQSGAEVKKPGASVKVSCKASGYTFTSYYMHWVRQAPGQGLEWMGIINPSGGSTIYAQKFQGRVTMTRDTSTSTVYMELSSLRSEDTAVYYCAKDMGAWAAGFDYWGQGTLVTVSSGGGGSGGGGSGGGGSDIQMTQSPSSLSASVGDRVTITCQASQDISNYLNWYQQKPGKAPKLLIYATSTLANGVPSRFSGSGSGTDFTLTISSLQPEDFATYYCQQSYSTLTFGQGTRLEIKTTTPAPRPPTPAPTIASQPLSLRPEACRPAAGGAVHTRGLDFACDIYIWAPLAGTCGVLLLSLVITLYCRRDQRLPPDAHKPPGGGSFRTPIQEEQADAHSTLAKIRVKFSRSADAPAYQQGQNQLYNELNLGRREEYDVLDKRRGRDPEMGGKPRRKNPQEGLYNELQKDKMAEAYSEIGMKGERRRGKGHDGLYQGLSTATKDTYDALHMQALPPRGSGEGRGSLLTCGDVEENPGPMALPVTALLLPLALLLHAARPNWVNVISDLKKIEDLIQSMHIDATLYTESDVHPSCKVTAMKCFLLELQVISLESGDASIHDTVENLIILANNSLSSNGNVTESGCKECEELEEKNIKEFLQSFVHIVQMFINTSTTTPAPRPPTPAPTIASQPLSLRPEACRPAAGGAVHTRGLDFACDIYIWAPLAGTCGVLLLSLVITLYC

SEQ ID NO: 393 - protein, 724 aa, synthetic construct
MALPVTALLLPLALLLHAARPDYKDDDDKGGGGSGGGGSQVQLVQSGAEVKKPGASVKVSCKASGYTFTGYYMHWVRQAPGQGLEWMGWINPNSGDTGYAQKFQGRVTMTRDTSTSTVYMELSSLRSEDTAVYYCARSVNDYGDYDGYWGQGTLVTVSSGGGGSGGGGSGGGGSDIQMTQSPSSLSASVGDRVTITCQASQDISNYLNWYQQKPGKAPKLLIYDASNLETGVPSRFSGSGSGTDFTLTISSLQPEDFATYYCQQSYSTPPTFGQGTKVEIKTTTPAPRPPTPAPTIASQPLSLRPEACRPAAGGAVHTRGLDFACDIYIWAPLAGTCGVLLLSLVITLYCRRDQRLPPDAHKPPGGGSFRTPIQEEQADAHSTLAKIRVKFSRSADAPAYQQGQNQLYNELNLGRREEYDVLDKRRGRDPEMGGKPRRKNPQEGLYNELQKDKMAEAYSEIGMKGERRRGKGHDGLYQGLSTATKDTYDALHMQALPPRGSGEGRGSLLTCGDVEENPGPMALPVTALLLPLALLLHAARPNWVNVISDLKKIEDLIQSMHIDATLYTESDVHPSCKVTAMKCFLLELQVISLESGDASIHDTVENLIILANNSLSSNGNVTESGCKECEELEEKNIKEFLQSFVHIVQMFINTSTTTPAPRPPTPAPTIASQPLSLRPEACRPAAGGAVHTRGLDFACDIYIWAPLAGTCGVLLLSLVITLYC

SEQ ID NO: 394 - protein, 724 aa, synthetic construct
MALPVTALLLPLALLLHAARPDYKDDDDKGGGGSGGGGSQVQLVQSGAEVKKPGASVKVSCKASGYTFTGYYMHWVRQAPGQGLEWMGIINPSGGSTSYAQKFQGRVTMTRDTSTSTVYMELSSLRSEDTAVYYCARDYGDYDASFDYWGQGTLVTVSSGGGGSGGGGSGGGGSDIQMTQSPSSLSASVGDRVTITCRASQSIDNWLAWYQQKPGKAPKLLIYAASTLQSGVPSRFSGSGSGTDFTLTISSLQPEDFATYYCQQSYDSPPTFGQGTKLEIKTTTPAPRPPTPAPTIASQPLSLRPEACRPAAGGAVHTRGLDFACDIYIWAPLAGTCGVLLLSLVITLYCRRDQRLPPDAHKPPGGGSFRTPIQEEQADAHSTLAKIRVKFSRSADAPAYQQGQNQLYNELNLGRREEYDVLDKRRGRDPEMGGKPRRKNPQEGLYNELQKDKMAEAYSEIGMKGERRRGKGHDGLYQGLSTATKDTYDALHMQALPPRGSGEGRGSLLTCGDVEENPGPMALPVTALLLPLALLLHAARPNWVNVISDLKKIEDLIQSMHIDATLYTESDVHPSCKVTAMKCFLLELQVISLESGDASIHDTVENLIILANNSLSSNGNVTESGCKECEELEEKNIKEFLQSFVHIVQMFINTSTTTPAPRPPTPAPTIASQPLSLRPEACRPAAGGAVHTRGLDFACDIYIWAPLAGTCGVLLLSLVITLYC

SEQ ID NO: 395 - protein, 721 aa, synthetic construct
MALPVTALLLPLALLLHAARPDYKDDDDKGGGGSGGGGSQVQLVQSGAEVKKPGASVKVSCKASGYTFTSYDINWVRQAPGQGLEWMGIINPSDGSTIYAQNFQGRVTMTRDTSTSTVYMELSSLRSEDTAVYYCVKEEAWYFDLWGRGTLVTVSSGGGGSGGGGSGGGGSDIQMTQSPSSLSASVGDRVTITCQASQDISNYLNWYQQKPGKAPKLLIYDASNLETGVPSRFSGSGSGTDFTLTISSLQPEDFATYYCQQSYSTPLTFGGGTKVEIKTTTPAPRPPTPAPTIASQPLSLRPEACRPAAGGAVHTRGLDFACDIYIWAPLAGTCGVLLLSLVITLYCRRDQRLPPDAHKPPGGGSFRTPIQEEQADAHSTLAKIRVKFSRSADAPAYQQGQNQLYNELNLGRREEYDVLDKRRGRDPEMGGKPRRKNPQEGLYNELQKDKMAEAYSEIGMKGERRRGKGHDGLYQGLSTATKDTYDALHMQALPPRGSGEGRGSLLTCGDVEENPGPMALPVTALLLPLALLLHAARPNWVNVISDLKKIEDLIQSMHIDATLYTESDVHPSCKVTAMKCFLLELQVISLESGDASIHDTVENLIILANNSLSSNGNVTESGCKECEELEEKNIKEFLQSFVHIVQMFINTSTTTPAPRPPTPAPTIASQPLSLRPEACRPAAGGAVHTRGLDFACDIYIWAPLAGTCGVLLLSLVITLYC

SEQ ID NO: 396 - protein, 721 aa, synthetic construct
MALPVTALLLPLALLLHAARPDYKDDDDKGGGGSGGGGSQVQLVQSGAEVKKPGASVKVSCKASGYTFTSYYMHWVRQAPGQGLEWMGWMNPDNGDTGYAQMFQGRVTMTRDTSTSTVYMELSSLRSEDTAVYYCASGDYYDILYWGQGTLVTVSSGGGGSGGGGSGGGGSDIQMTQSPSSLSASVGDRVTITCQASQDISNYLNWYQQKPGKAPKLLIYDVSNLETGVPSRFSGSGSGTDFTLTISSLQPEDFATYYCQQANSFPLTFGGGTKVEIKTTTPAPRPPTPAPTIASQPLSLRPEACRPAAGGAVHTRGLDFACDIYIWAPLAGTCGVLLLSLVITLYCRRDQRLPPDAHKPPGGGSFRTPIQEEQADAHSTLAKIRVKFSRSADAPAYQQGQNQLYNELNLGRREEYDVLDKRRGRDPEMGGKPRRKNPQEGLYNELQKDKMAEAYSEIGMKGERRRGKGHDGLYQGLSTATKDTYDALHMQALPPRGSGEGRGSLLTCGDVEENPGPMALPVTALLLPLALLLHAARPNWVNVISDLKKIEDLIQSMHIDATLYTESDVHPSCKVTAMKCFLLELQVISLESGDASIHDTVENLIILANNSLSSNGNVTESGCKECEELEEKNIKEFLQSFVHIVQMFINTSTTTPAPRPPTPAPTIASQPLSLRPEACRPAAGGAVHTRGLDFACDIYIWAPLAGTCGVLLLSLVITLYC

SEQ ID NO: 397 - protein, 722 aa, synthetic construct
MALPVTALLLPLALLLHAARPDYKDDDDKGGGGSGGGGSQVQLVQSGAEVKKPGASVKVSCKASGYTFTSYYMHWVRQAPGQGLEWMGWMNPNSGDTGYAQKFQGRVTMTRDTSTSTVYMELSSLRSEDTAVYYCARGPSGYEFDYWGQGTLVTVSSGGGGSGGGGSGGGGSDIQMTQSPSSLSASVGDRVTITCRASQTISNYLNWYQQKPGKAPKLLIYDASSLESGVPSRFSGSGSGTDFTLTISSLQPEDFATYYCQQAISFPLTFGGGTKVEIKTTTPAPRPPTPAPTIASQPLSLRPEACRPAAGGAVHTRGLDFACDIYIWAPLAGTCGVLLLSLVITLYCRRDQRLPPDAHKPPGGGSFRTPIQEEQADAHSTLAKIRVKFSRSADAPAYQQGQNQLYNELNLGRREEYDVLDKRRGRDPEMGGKPRRKNPQEGLYNELQKDKMAEAYSEIGMKGERRRGKGHDGLYQGLSTATKDTYDALHMQALPPRGSGEGRGSLLTCGDVEENPGPMALPVTALLLPLALLLHAARPNWVNVISDLKKIEDLIQSMHIDATLYTESDVHPSCKVTAMKCFLLELQVISLESGDASIHDTVENLIILANNSLSSNGNVTESGCKECEELEEKNIKEFLQSFVHIVQMFINTSTTTPAPRPPTPAPTIASQPLSLRPEACRPAAGGAVHTRGLDFACDIYIWAPLAGTCGVLLLSLVITLYC

SEQ ID NO: 398 - protein, 726 aa, synthetic construct
MALPVTALLLPLALLLHAARPDYKDDDDKGGGGSGGGGSQVQLVQSGAEVKKPGASVKVSCKASGYTFTDYYMHWVRQAPGQGLEWMGIINPNSGGTNYAQKFQGRVTMTRDTSTSTVYMELSSLRSEDTAVYYCARDFSVYAAADGMDVWGQGTLVTVSSGGGGSGGGGSGGGGSDIQMTQSPSSLSASVGDRVTITCRASQSISSYLNWYQQKPGKAPKLLIYDASNLATGVPSRFSGSGSGTDFTLTISSLQPEDFATYYCQQSDSSPLTFGQGTKVEIKTTTPAPRPPTPAPTIASQPLSLRPEACRPAAGGAVHTRGLDFACDIYIWAPLAGTCGVLLLSLVITLYCRRDQRLPPDAHKPPGGGSFRTPIQEEQADAHSTLAKIRVKFSRSADAPAYQQGQNQLYNELNLGRREEYDVLDKRRGRDPEMGGKPRRKNPQEGLYNELQKDKMAEAYSEIGMKGERRRGKGHDGLYQGLSTATKDTYDALHMQALPPRGSGEGRGSLLTCGDVEENPGPMALPVTALLLPLALLLHAARPNWVNVISDLKKIEDLIQSMHIDATLYTESDVHPSCKVTAMKCFLLELQVISLESGDASIHDTVENLIILANNSLSSNGNVTESGCKECEELEEKNIKEFLQSFVHIVQMFINTSTTTPAPRPPTPAPTIASQPLSLRPEACRPAAGGAVHTRGLDFACDIYIWAPLAGTCGVLLLSLVITLYC

SEQ ID NO: 399 - protein, 725 aa, synthetic construct
MALPVTALLLPLALLLHAARPDYKDDDDKGGGGSGGGGSQVQLVQSGAEVKKPGASVKVSCKASGYTFTGYYMHWVRQAPGQGLEWMGIINPGDGGTIYAQNFQGRVTMTRDTSTSTVYMELSSLRSEDTAVYYCARGFGESAPDAFDIWGQGTMVTVSSGGGGSGGGGSGGGGSDIQMTQSPSSLSASVGDRVTITCQASQDISNYLNWYQQKPGKAPKLLIYGATTLQSGVPSRFSGSGSGTDFTLTISSLQPEDFATYYCQQADSFPYTFGQGTKLEIKTTTPAPRPPTPAPTIASQPLSLRPEACRPAAGGAVHTRGLDFACDIYIWAPLAGTCGVLLLSLVITLYCRRDQRLPPDAHKPPGGGSFRTPIQEEQADAHSTLAKIRVKFSRSADAPAYQQGQNQLYNELNLGRREEYDVLDKRRGRDPEMGGKPRRKNPQEGLYNELQKDKMAEAYSEIGMKGERRRGKGHDGLYQGLSTATKDTYDALHMQALPPRGSGEGRGSLLTCGDVEENPGPMALPVTALLLPLALLLHAARPNWVNVISDLKKIEDLIQSMHIDATLYTESDVHPSCKVTAMKCFLLELQVISLESGDASIHDTVENLIILANNSLSSNGNVTESGCKECEELEEKNIKEFLQSFVHIVQMFINTSTTTPAPRPPTPAPTIASQPLSLRPEACRPAAGGAVHTRGLDFACDIYIWAPLAGTCGVLLLSLVITLYC

SEQ ID NO: 400 - protein, 722 aa, synthetic construct
MALPVTALLLPLALLLHAARPDYKDDDDKGGGGSGGGGSQVQLVQSGAEVKKPGASVKVSCKASGYTFTGYYMHWVRQAPGQGLEWMGIINPSGGSTSYAQKFQGRVTMTRDTSTSTVYMELSSLRSEDTAVYYCAAGTEIYYMDVWGKGTTVTVSSGGGGSGGGGSGGGGSDIQMTQSPSSLSASVGDRVTITCRASQTIDIYLNWYQQKPGKAPKLLIYDASNLETGVPSRFSGSGSGTDFTLTISSLQPEDFATYYCQQADSFPLTFGGGTKVEIKTTTPAPRPPTPAPTIASQPLSLRPEACRPAAGGAVHTRGLDFACDIYIWAPLAGTCGVLLLSLVITLYCRRDQRLPPDAHKPPGGGSFRTPIQEEQADAHSTLAKIRVKFSRSADAPAYQQGQNQLYNELNLGRREEYDVLDKRRGRDPEMGGKPRRKNPQEGLYNELQKDKMAEAYSEIGMKGERRRGKGHDGLYQGLSTATKDTYDALHMQALPPRGSGEGRGSLLTCGDVEENPGPMALPVTALLLPLALLLHAARPNWVNVISDLKKIEDLIQSMHIDATLYTESDVHPSCKVTAMKCFLLELQVISLESGDASIHDTVENLIILANNSLSSNGNVTESGCKECEELEEKNIKEFLQSFVHIVQMFINTSTTTPAPRPPTPAPTIASQPLSLRPEACRPAAGGAVHTRGLDFACDIYIWAPLAGTCGVLLLSLVITLYC

SEQ ID NO: 401 - protein, 731 aa, synthetic construct
MALPVTALLLPLALLLHAARPDYKDDDDKGGGGSGGGGSQVQLVQSGAEVKKPGASVKVSCKASGGTFSSYAISWVRQAPGQGLEWMGMINPSDGATTYAQKFQGRVTMTRDTSTSTVYMELSSLRSEDTAVYYCARERELLHFATNYYYYGMDVWGQGTTVTVSSGGGGSGGGGSGGGGSDIQMTQSPSSLSASVGDRVTITCRASQGISNNLNWYQQKPGKAPKLLIYAASSLHSGVPSRFSGSGSGTDFTLTISSLQPEDFATYYCQQADAFPLTFGGGTKVEIKTTTPAPRPPTPAPTIASQPLSLRPEACRPAAGGAVHTRGLDFACDIYIWAPLAGTCGVLLLSLVITLYCRRDQRLPPDAHKPPGGGSFRTPIQEEQADAHSTLAKIRVKFSRSADAPAYQQGQNQLYNELNLGRREEYDVLDKRRGRDPEMGGKPRRKNPQEGLYNELQKDKMAEAYSEIGMKGERRRGKGHDGLYQGLSTATKDTYDALHMQALPPRGSGEGRGSLLTCGDVEENPGPMALPVTALLLPLALLLHAARPNWVNVISDLKKIEDLIQSMHIDATLYTESDVHPSCKVTAMKCFLLELQVISLESGDASIHDTVENLIILANNSLSSNGNVTESGCKECEELEEKNIKEFLQSFVHIVQMFINTSTTTPAPRPPTPAPTIASQPLSLRPEACRPAAGGAVHTRGLDFACDIYIWAPLAGTCGVLLLSLVITLYC

SEQ ID NO: 402 - protein, 727 aa, synthetic construct
MALPVTALLLPLALLLHAARPDYKDDDDKGGGGSGGGGSQVQLVQSGAEVKKPGASVKVSCKASGYTFTRNYMHWVRQAPGQGLEWMGWISPDNGVTNYAQNFQGRVTMTRDTSTSTVYMELSSLRSEDTAVYYCAKTQGSSSWYQWYFDLWGRGTLVTVSSGGGGSGGGGSGGGGSDIQMTQSPSSLSASVGDRVTITCRASQSIGTWLAWYQQKPGKAPKLLIYAASSLQSGVPSRFSGSGSGTDFTLTISSLQPEDFATYYCQQSYTTPITFGQGTKVEIKTTTPAPRPPTPAPTIASQPLSLRPEACRPAAGGAVHTRGLDFACDIYIWAPLAGTCGVLLLSLVITLYCRRDQRLPPDAHKPPGGGSFRTPIQEEQADAHSTLAKIRVKFSRSADAPAYQQGQNQLYNELNLGRREEYDVLDKRRGRDPEMGGKPRRKNPQEGLYNELQKDKMAEAYSEIGMKGERRRGKGHDGLYQGLSTATKDTYDALHMQALPPRGSGEGRGSLLTCGDVEENPGPMALPVTALLLPLALLLHAARPNWVNVISDLKKIEDLIQSMHIDATLYTESDVHPSCKVTAMKCFLLELQVISLESGDASIHDTVENLIILANNSLSSNGNVTESGCKECEELEEKNIKEFLQSFVHIVQMFINTSTTTPAPRPPTPAPTIASQPLSLRPEACRPAAGGAVHTRGLDFACDIYIWAPLAGTCGVLLLSLVITLYC

SEQ ID NO: 403 - protein, 723 aa, synthetic construct
MALPVTALLLPLALLLHAARPDYKDDDDKGGGGSGGGGSQVQLVQSGAEVKKPGASVKVSCKASGYTFTSYYMHWVRQAPGQGLEWMGIIDPGSGDTSYAQKFQGRVTMTRDTSTSTVYMELSSLRSEDTAVYYCARGSNWYDYFDYWGQGTLVTVSSGGGGSGGGGSGGGGSEIVMTQSPATLSVSPGERATLSCRASQSVSSYLAWYQQKPGQAPRLLIYGASTRATGIPARFSGSGSGTEFTLTISSLQSEDFAVYYCQQYDSYPPTFGGGTKVEIKTTTPAPRPPTPAPTIASQPLSLRPEACRPAAGGAVHTRGLDFACDIYIWAPLAGTCGVLLLSLVITLYCRRDQRLPPDAHKPPGGGSFRTPIQEEQADAHSTLAKIRVKFSRSADAPAYQQGQNQLYNELNLGRREEYDVLDKRRGRDPEMGGKPRRKNPQEGLYNELQKDKMAEAYSEIGMKGERRRGKGHDGLYQGLSTATKDTYDALHMQALPPRGSGEGRGSLLTCGDVEENPGPMALPVTALLLPLALLLHAARPNWVNVISDLKKIEDLIQSMHIDATLYTESDVHPSCKVTAMKCFLLELQVISLESGDASIHDTVENLIILANNSLSSNGNVTESGCKECEELEEKNIKEFLQSFVHIVQMFINTSTTTPAPRPPTPAPTIASQPLSLRPEACRPAAGGAVHTRGLDFACDIYIWAPLAGTCGVLLLSLVITLYC

SEQ ID NO: 404 - protein, 723 aa, synthetic construct
MALPVTALLLPLALLLHAARPDYKDDDDKGGGGSGGGGSQVQLVQSGAEVKKPGASVKVSCKASGYRLSDHYMHWVRQAPGQGLEWMGIINPSGGSTTYAQNFQGRVTMTRDTSTSTVYMELSSLRSEDTAVYYCASSYYGDYVLVNWGQGTLVTVSSGGGGSGGGGSGGGGSDIQMTQSPSSLSASVGDRVTITCQASQDISNYLNWYQQKPGKAPKLLIYAASTLESGVPSRFSGSGSGTDFTLTISSLQPEDFATYYCLQDYDYPLTFGQGTKLEIKTTTPAPRPPTPAPTIASQPLSLRPEACRPAAGGAVHTRGLDFACDIYIWAPLAGTCGVLLLSLVITLYCRRDQRLPPDAHKPPGGGSFRTPIQEEQADAHSTLAKIRVKFSRSADAPAYQQGQNQLYNELNLGRREEYDVLDKRRGRDPEMGGKPRRKNPQEGLYNELQKDKMAEAYSEIGMKGERRRGKGHDGLYQGLSTATKDTYDALHMQALPPRGSGEGRGSLLTCGDVEENPGPMALPVTALLLPLALLLHAARPNWVNVISDLKKIEDLIQSMHIDATLYTESDVHPSCKVTAMKCFLLELQVISLESGDASIHDTVENLIILANNSLSSNGNVTESGCKECEELEEKNIKEFLQSFVHIVQMFINTSTTTPAPRPPTPAPTIASQPLSLRPEACRPAAGGAVHTRGLDFACDIYIWAPLAGTCGVLLLSLVITLYC

SEQ ID NO: 405 - protein, 724 aa, synthetic construct
MALPVTALLLPLALLLHAARPDYKDDDDKGGGGSGGGGSQVQLVQSGAEVKKPGASVKVSCKASGYTFTDYYVHWVRQAPGQGLEWMGWINPNTGGTSFAQNFQGRVTMTRDTSTSTVYMELSSLRSEDTAVYYCARDLGQWLGEIDYWGQGTLVTVSSGGGGSGGGGSGGGGSDIQMTQSPSSLSASVGDRVTITCRASQTIYKWLAWYQQKPGKAPKLLIYDASSLESGVPSRFSGSGSGTDFTLTISSLQPEDFATYYCQQANSFPFTFGPGTKVDIKTTTPAPRPPTPAPTIASQPLSLRPEACRPAAGGAVHTRGLDFACDIYIWAPLAGTCGVLLLSLVITLYCRRDQRLPPDAHKPPGGGSFRTPIQEEQADAHSTLAKIRVKFSRSADAPAYQQGQNQLYNELNLGRREEYDVLDKRRGRDPEMGGKPRRKNPQEGLYNELQKDKMAEAYSEIGMKGERRRGKGHDGLYQGLSTATKDTYDALHMQALPPRGSGEGRGSLLTCGDVEENPGPMALPVTALLLPLALLLHAARPNWVNVISDLKKIEDLIQSMHIDATLYTESDVHPSCKVTAMKCFLLELQVISLESGDASIHDTVENLIILANNSLSSNGNVTESGCKECEELEEKNIKEFLQSFVHIVQMFINTSTTTPAPRPPTPAPTIASQPLSLRPEACRPAAGGAVHTRGLDFACDIYIWAPLAGTCGVLLLSLVITLYC

SEQ ID NO: 406 - protein, 728 aa, synthetic construct
MALPVTALLLPLALLLHAARPDYKDDDDKGGGGSGGGGSQVQLVQSGAEVKKPGASVKVSCKASGYTFTDYTDYFVHWVRQAPGQGLEWMGIFNPSDGSTSYAQEFQGRVTMTRDTSTSTVYMELSSLRSEDTAVYYCARGPYSSSWYYFDYWGQGTLVTVSSGGGGSGGGGSGGGGSDIQMTQSPSSLSASVGDRVTITCQASQDISNYLNWYQQKPGKAPKLLIYDASNLETGVPSRFSGSGSGTDFTLTISSLQPEDFATYYCQQAHSFPPTFGQGTKVEIKTTTPAPRPPTPAPTIASQPLSLRPEACRPAAGGAVHTRGLDFACDIYIWAPLAGTCGVLLLSLVITLYCRRDQRLPPDAHKPPGGGSFRTPIQEEQADAHSTLAKIRVKFSRSADAPAYQQGQNQLYNELNLGRREEYDVLDKRRGRDPEMGGKPRRKNPQEGLYNELQKDKMAEAYSEIGMKGERRRGKGHDGLYQGLSTATKDTYDALHMQALPPRGSGEGRGSLLTCGDVEENPGPMALPVTALLLPLALLLHAARPNWVNVISDLKKIEDLIQSMHIDATLYTESDVHPSCKVTAMKCFLLELQVISLESGDASIHDTVENLIILANNSLSSNGNVTESGCKECEELEEKNIKEFLQSFVHIVQMFINTSTTTPAPRPPTPAPTIASQPLSLRPEACRPAAGGAVHTRGLDFACDIYIWAPLAGTCGVLLLSLVITLYC

SEQ ID NO: 407 - protein, 724 aa, synthetic construct
MALPVTALLLPLALLLHAARPDYKDDDDKGGGGSGGGGSQVQLVQSGAEVKKPGASVKVSCKASGYIFTDYYMHWVRQAPGQGLEWMGIINPSGGDTLYAQKFQGRVTMTRDTSTSTVYMELSSLRSEDTAVYYCAREGVGAMGVFDYWGQGTLVTVSSGGGGSGGGGSGGGGSDIQMTQSPSSLSASVGDRVTITCRASTSISDYVHWYQQKPGKAPKLLIYDASSLQSGVPSRFSGSGSGTDFTLTISSLQPEDFATYYCQQSDSTPPTFGGGTKVEIKTTTPAPRPPTPAPTIASQPLSLRPEACRPAAGGAVHTRGLDFACDIYIWAPLAGTCGVLLLSLVITLYCRRDQRLPPDAHKPPGGGSFRTPIQEEQADAHSTLAKIRVKFSRSADAPAYQQGQNQLYNELNLGRREEYDVLDKRRGRDPEMGGKPRRKNPQEGLYNELQKDKMAEAYSEIGMKGERRRGKGHDGLYQGLSTATKDTYDALHMQALPPRGSGEGRGSLLTCGDVEENPGPMALPVTALLLPLALLLHAARPNWVNVISDLKKIEDLIQSMHIDATLYTESDVHPSCKVTAMKCFLLELQVISLESGDASIHDTVENLIILANNSLSSNGNVTESGCKECEELEEKNIKEFLQSFVHIVQMFINTSTTTPAPRPPTPAPTIASQPLSLRPEACRPAAGGAVHTRGLDFACDIYIWAPLAGTCGVLLLSLVITLYC

SEQ ID NO: 408 - protein, 726 aa, synthetic construct
MALPVTALLLPLALLLHAARPDYKDDDDKGGGGSGGGGSQVQLVQSGAEVKKPGASVKVSCKASGYTFTDHYIHWVRQAPGQGLEWMGWISAYNGKTNYAQKFQGRVTMTRDTSTSTVYMELSSLRSEDTAVYYCARDTIYYDFWSGYDYWGQGTLVTVSSGGGGSGGGGSGGGGSDIQMTQSPSSLSASVGDRVTITCRASQGISNNLNWYQQKPGKAPKLLIYYASTLQSGVPSRFSGSGSGTDFTLTISSLQPEDFATYYCQQSYSTPITFGQGTRLEIKTTTPAPRPPTPAPTIASQPLSLRPEACRPAAGGAVHTRGLDFACDIYIWAPLAGTCGVLLLSLVITLYCRRDQRLPPDAHKPPGGGSFRTPIQEEQADAHSTLAKIRVKFSRSADAPAYQQGQNQLYNELNLGRREEYDVLDKRRGRDPEMGGKPRRKNPQEGLYNELQKDKMAEAYSEIGMKGERRRGKGHDGLYQGLSTATKDTYDALHMQALPPRGSGEGRGSLLTCGDVEENPGPMALPVTALLLPLALLLHAARPNWVNVISDLKKIEDLIQSMHIDATLYTESDVHPSCKVTAMKCFLLELQVISLESGDASIHDTVENLIILANNSLSSNGNVTESGCKECEELEEKNIKEFLQSFVHIVQMFINTSTTTPAPRPPTPAPTIASQPLSLRPEACRPAAGGAVHTRGLDFACDIYIWAPLAGTCGVLLLSLVITLYC

SEQ ID NO: 409 - protein, 726 aa, synthetic construct
MALPVTALLLPLALLLHAARPDYKDDDDKGGGGSGGGGSQVQLVQSGAEVKKPGASVKVSCKASGYTFTSYYMHWVRQAPGQGLEWMGIINPSGGATIYAQKFQGRVTMTRDTSTSTVYMELSSLRSEDTAVYYCARSRGDYYGSGDFDYWGQGTLVTVSSGGGGSGGGGSGGGGSDIQMTQSPSSLSASVGDRVTITCRASQTISNYLNWYQQKPGKAPKLLIYDASTLEAGVPSRFSGSGSGTDFTLTISSLQPEDFATYYCQQSYNPPYTFGQGTKLEIKTTTPAPRPPTPAPTIASQPLSLRPEACRPAAGGAVHTRGLDFACDIYIWAPLAGTCGVLLLSLVITLYCRRDQRLPPDAHKPPGGGSFRTPIQEEQADAHSTLAKIRVKFSRSADAPAYQQGQNQLYNELNLGRREEYDVLDKRRGRDPEMGGKPRRKNPQEGLYNELQKDKMAEAYSEIGMKGERRRGKGHDGLYQGLSTATKDTYDALHMQALPPRGSGEGRGSLLTCGDVEENPGPMALPVTALLLPLALLLHAARPNWVNVISDLKKIEDLIQSMHIDATLYTESDVHPSCKVTAMKCFLLELQVISLESGDASIHDTVENLIILANNSLSSNGNVTESGCKECEELEEKNIKEFLQSFVHIVQMFINTSTTTPAPRPPTPAPTIASQPLSLRPEACRPAAGGAVHTRGLDFACDIYIWAPLAGTCGVLLLSLVITLYC

SEQ ID NO: 410 - protein, 722 aa, synthetic construct
MALPVTALLLPLALLLHAARPDYKDDDDKGGGGSGGGGSQVQLVQSGAEVKKPGASVKVSCKASGYTFTDYYMHWVRQAPGQGLEWMGIINPSGGSTSYAQKFQGRVTMTRDTSTSTVYMELSSLRSEDTAVYYCARGYFDHAFDIWGQGTMVTVSSGGGGSGGGGSGGGGSDIQMTQSPSSLSASVGDRVTITCRASQSISTYLNWYQQKPGKAPKLLIYDASNLEIGVPSRFSGSGSGTDFTLTISSLQPEDFATYYCQQSDSSPLTFGQGTKVEIKTTTPAPRPPTPAPTIASQPLSLRPEACRPAAGGAVHTRGLDFACDIYIWAPLAGTCGVLLLSLVITLYCRRDQRLPPDAHKPPGGGSFRTPIQEEQADAHSTLAKIRVKFSRSADAPAYQQGQNQLYNELNLGRREEYDVLDKRRGRDPEMGGKPRRKNPQEGLYNELQKDKMAEAYSEIGMKGERRRGKGHDGLYQGLSTATKDTYDALHMQALPPRGSGEGRGSLLTCGDVEENPGPMALPVTALLLPLALLLHAARPNWVNVISDLKKIEDLIQSMHIDATLYTESDVHPSCKVTAMKCFLLELQVISLESGDASIHDTVENLIILANNSLSSNGNVTESGCKECEELEEKNIKEFLQSFVHIVQMFINTSTTTPAPRPPTPAPTIASQPLSLRPEACRPAAGGAVHTRGLDFACDIYIWAPLAGTCGVLLLSLVITLYC

SEQ ID NO: 411 - protein, 728 aa, synthetic construct
MALPVTALLLPLALLLHAARPDYKDDDDKGGGGSGGGGSQVQLVQSGAEVKKPGASVKVSCKASGYTFTGYYMHWVRQAPGQGLEWMGIINPSGGDTIYAQKFQGRVTMTRDTSTSTVYMELSSLRSEDTAVYYCARGDSSSWYDYYYYMDVWGKGTTVTVSSGGGGSGGGGSGGGGSDIQMTQSPSSLSASVGDRVTITCQASQDISNYLNWYQQKPGKAPKLLIYAASSLQSGVPSRFSGSGSGTDFTLTISSLQPEDFATYYCQQSYRTPLTFGGGTKVEIKTTTPAPRPPTPAPTIASQPLSLRPEACRPAAGGAVHTRGLDFACDIYIWAPLAGTCGVLLLSLVITLYCRRDQRLPPDAHKPPGGGSFRTPIQEEQADAHSTLAKIRVKFSRSADAPAYQQGQNQLYNELNLGRREEYDVLDKRRGRDPEMGGKPRRKNPQEGLYNELQKDKMAEAYSEIGMKGERRRGKGHDGLYQGLSTATKDTYDALHMQALPPRGSGEGRGSLLTCGDVEENPGPMALPVTALLLPLALLLHAARPNWVNVISDLKKIEDLIQSMHIDATLYTESDVHPSCKVTAMKCFLLELQVISLESGDASIHDTVENLIILANNSLSSNGNVTESGCKECEELEEKNIKEFLQSFVHIVQMFINTSTTTPAPRPPTPAPTIASQPLSLRPEACRPAAGGAVHTRGLDFACDIYIWAPLAGTCGVLLLSLVITLYC

SEQ ID NO: 412 - protein, 723 aa, synthetic construct
MALPVTALLLPLALLLHAARPDYKDDDDKGGGGSGGGGSQVQLVQSGAEVKKPGASVKVSCKASGYTFTDYFTHWVRQAPGQGLEWMGWINTYDGNTNYAQKFQGRVTMTRDTSTSTVYMELSSLRSEDTAVYYCAREMEWLGQVDYWGQGTLVTVSSGGGGSGGGGSGGGGSDIQMTQSPSSLSASVGDRVTITCRASQDIRNDLGWYQQKPGKAPKLLIYAASNLETGVPSRFSGSGSGTDFTLTISSLQPEDFATYYCQQSYSAPFTFGPGTKVDIKTTTPAPRPPTPAPTIASQPLSLRPEACRPAAGGAVHTRGLDFACDIYIWAPLAGTCGVLLLSLVITLYCRRDQRLPPDAHKPPGGGSFRTPIQEEQADAHSTLAKIRVKFSRSADAPAYQQGQNQLYNELNLGRREEYDVLDKRRGRDPEMGGKPRRKNPQEGLYNELQKDKMAEAYSEIGMKGERRRGKGHDGLYQGLSTATKDTYDALHMQALPPRGSGEGRGSLLTCGDVEENPGPMALPVTALLLPLALLLHAARPNWVNVISDLKKIEDLIQSMHIDATLYTESDVHPSCKVTAMKCFLLELQVISLESGDASIHDTVENLIILANNSLSSNGNVTESGCKECEELEEKNIKEFLQSFVHIVQMFINTSTTTPAPRPPTPAPTIASQPLSLRPEACRPAAGGAVHTRGLDFACDIYIWAPLAGTCGVLLLSLVITLYC

SEQ ID NO: 413 - protein, 723 aa, synthetic construct
MALPVTALLLPLALLLHAARPDYKDDDDKGGGGSGGGGSQVQLVQSGAEVKKPGASVKVSCKASGYTFTSYYIHWVRQAPGQGLEWMGRINPNGGGTNYAQKFQGRVTMTRDTSTSTVYMELSSLRSEDTAVYYCARGHRGGGGIDYWGQGTLVTVSSGGGGSGGGGSGGGGSDIQMTQSPSSLSASVGDRVTITCRASQEISNYLAWYQQKPGKAPKLLIYDASNLQTGVPSRFSGSGSGTDFTLTISSLQPEDFATYYCQQSYSTPFTFGPGTKVDIKTTTPAPRPPTPAPTIASQPLSLRPEACRPAAGGAVHTRGLDFACDIYIWAPLAGTCGVLLLSLVITLYCRRDQRLPPDAHKPPGGGSFRTPIQEEQADAHSTLAKIRVKFSRSADAPAYQQGQNQLYNELNLGRREEYDVLDKRRGRDPEMGGKPRRKNPQEGLYNELQKDKMAEAYSEIGMKGERRRGKGHDGLYQGLSTATKDTYDALHMQALPPRGSGEGRGSLLTCGDVEENPGPMALPVTALLLPLALLLHAARPNWVNVISDLKKIEDLIQSMHIDATLYTESDVHPSCKVTAMKCFLLELQVISLESGDASIHDTVENLIILANNSLSSNGNVTESGCKECEELEEKNIKEFLQSFVHIVQMFINTSTTTPAPRPPTPAPTIASQPLSLRPEACRPAAGGAVHTRGLDFACDIYIWAPLAGTCGVLLLSLVITLYC

SEQ ID NO: 414 - protein, 723 aa, synthetic construct
MALPVTALLLPLALLLHAARPDYKDDDDKGGGGSGGGGSQVQLVQSGAEVKKPGASVKVSCKASGGTFSSYAISWVRQAPGQGLEWMGWISPNSGDTHYAQKFQGRVTMTRDTSTSTVYMELSSLRSEDTAVYYCARDWGSGWYVDYWGQGTLVTVSSGGGGSGGGGSGGGGSDIQMTQSPSSLSASVGDRVTITCQASQDISDSLNWYQQKPGKAPKLLIYSASSLQSGVPSRFSGSGSGTDFTLTISSLQPEDFATYYCQQSFTTPYTFGQGTKVEIKTTTPAPRPPTPAPTIASQPLSLRPEACRPAAGGAVHTRGLDFACDIYIWAPLAGTCGVLLLSLVITLYCRRDQRLPPDAHKPPGGGSFRTPIQEEQADAHSTLAKIRVKFSRSADAPAYQQGQNQLYNELNLGRREEYDVLDKRRGRDPEMGGKPRRKNPQEGLYNELQKDKMAEAYSEIGMKGERRRGKGHDGLYQGLSTATKDTYDALHMQALPPRGSGEGRGSLLTCGDVEENPGPMALPVTALLLPLALLLHAARPNWVNVISDLKKIEDLIQSMHIDATLYTESDVHPSCKVTAMKCFLLELQVISLESGDASIHDTVENLIILANNSLSSNGNVTESGCKECEELEEKNIKEFLQSFVHIVQMFINTSTTTPAPRPPTPAPTIASQPLSLRPEACRPAAGGAVHTRGLDFACDIYIWAPLAGTCGVLLLSLVITLYC

SEQ ID NO: 415 - protein, 723 aa, synthetic construct
MALPVTALLLPLALLLHAARPDYKDDDDKGGGGSGGGGSQVQLVQSGAEVKKPGSSVKVSCKASGGTFNSYGISWVRQAPGQGLEWMGGIIPIFGTANYAQKFQGRVTITADESTSTAYMELSSLRSEDTAVYYCARDTYGDDAFDIWGQGTMVTVSSGGGGSGGGGSGGGGSDIQMTQSPSSLSASVGDRVTITCRASQSISSWLAWYQQKPGKAPKLLIYDASNLETGVPSRFSGSGSGTDFTLTISSLQPEDFATYYCQQNFSPPLTFGQGTRLEIKTTTPAPRPPTPAPTIASQPLSLRPEACRPAAGGAVHTRGLDFACDIYIWAPLAGTCGVLLLSLVITLYCRRDQRLPPDAHKPPGGGSFRTPIQEEQADAHSTLAKIRVKFSRSADAPAYQQGQNQLYNELNLGRREEYDVLDKRRGRDPEMGGKPRRKNPQEGLYNELQKDKMAEAYSEIGMKGERRRGKGHDGLYQGLSTATKDTYDALHMQALPPRGSGEGRGSLLTCGDVEENPGPMALPVTALLLPLALLLHAARPNWVNVISDLKKIEDLIQSMHIDATLYTESDVHPSCKVTAMKCFLLELQVISLESGDASIHDTVENLIILANNSLSSNGNVTESGCKECEELEEKNIKEFLQSFVHIVQMFINTSTTTPAPRPPTPAPTIASQPLSLRPEACRPAAGGAVHTRGLDFACDIYIWAPLAGTCGVLLLSLVITLYC

SEQ ID NO: 416 - protein, 728 aa, synthetic construct
MALPVTALLLPLALLLHAARPDYKDDDDKGGGGSGGGGSQVQLVQSGAEVKKPGASVKVSCKASGYSFTSYYMHWVRQAPGQGLEWMGIINPSGGTTSYAQKFQGRVTMTRDTSTSTVYMELSSLRSEDTAVYYCARDNSPYSSSWWDYFDYWGQGTLVTVSSGGGGSGGGGSGGGGSDIQMTQSPSSLSASVGDRVTITCRASQDIRHYLAWYQQKPGKAPKLLIYDASSLQSGVPSRFSGSGSGTDFTLTISSLQPEDFATYYCQQTYDAPITFGQGTRLEIKTTTPAPRPPTPAPTIASQPLSLRPEACRPAAGGAVHTRGLDFACDIYIWAPLAGTCGVLLLSLVITLYCRRDQRLPPDAHKPPGGGSFRTPIQEEQADAHSTLAKIRVKFSRSADAPAYQQGQNQLYNELNLGRREEYDVLDKRRGRDPEMGGKPRRKNPQEGLYNELQKDKMAEAYSEIGMKGERRRGKGHDGLYQGLSTATKDTYDALHMQALPPRGSGEGRGSLLTCGDVEENPGPMALPVTALLLPLALLLHAARPNWVNVISDLKKIEDLIQSMHIDATLYTESDVHPSCKVTAMKCFLLELQVISLESGDASIHDTVENLIILANNSLSSNGNVTESGCKECEELEEKNIKEFLQSFVHIVQMFINTSTTTPAPRPPTPAPTIASQPLSLRPEACRPAAGGAVHTRGLDFACDIYIWAPLAGTCGVLLLSLVITLYC

SEQ ID NO: 417 - protein, 726 aa, synthetic construct
MALPVTALLLPLALLLHAARPDYKDDDDKGGGGSGGGGSQVQLVQSGAEVKKPGASVKVSCKASGYTFTDYYIHWVRQAPGQGLEWMGWITPNSGYTYYAQNFQGRVTMTRDTSTSTVYMELSSLRSEDTAVYYCARNTDCYGDFLGLDVWGQGTTVTVSSGGGGSGGGGSGGGGSDIVMTQSPDSLAVSLGERATINCRASSSISNYLAWYQQKPGQPPKLLIYGASTRASGVPDRFSGSGSGTDFTLTISSLQAEDVAVYYCQQSYSTPLTFGQGTKVEIKTTTPAPRPPTPAPTIASQPLSLRPEACRPAAGGAVHTRGLDFACDIYIWAPLAGTCGVLLLSLVITLYCRRDQRLPPDAHKPPGGGSFRTPIQEEQADAHSTLAKIRVKFSRSADAPAYQQGQNQLYNELNLGRREEYDVLDKRRGRDPEMGGKPRRKNPQEGLYNELQKDKMAEAYSEIGMKGERRRGKGHDGLYQGLSTATKDTYDALHMQALPPRGSGEGRGSLLTCGDVEENPGPMALPVTALLLPLALLLHAARPNWVNVISDLKKIEDLIQSMHIDATLYTESDVHPSCKVTAMKCFLLELQVISLESGDASIHDTVENLIILANNSLSSNGNVTESGCKECEELEEKNIKEFLQSFVHIVQMFINTSTTTPAPRPPTPAPTIASQPLSLRPEACRPAAGGAVHTRGLDFACDIYIWAPLAGTCGVLLLSLVITLYC

SEQ ID NO: 418 - protein, 726 aa, synthetic construct
MALPVTALLLPLALLLHAARPDYKDDDDKGGGGSGGGGSQVQLVQSGAEVKKPGASVKVSCKASGYTFNGYLMHWVRQAPGQGLEWMGIVNPSDGSTGYAQKFQGRVTMTRDTSTSTVYMELSSLRSEDTAVYYCAKDTGLRYFDWLLDYWGQGTLVTVSSGGGGSGGGGSGGGGSDIQMTQSPSSLSASVGDRVTITCRASQGITNFLAWYQQKPGKAPKLLIYDASNLETGVPSRFSGSGSGTDFTLTISSLQPEDFATYYCQQSYGAPLTFGQGTRLEIKTTTPAPRPPTPAPTIASQPLSLRPEACRPAAGGAVHTRGLDFACDIYIWAPLAGTCGVLLLSLVITLYCRRDQRLPPDAHKPPGGGSFRTPIQEEQADAHSTLAKIRVKFSRSADAPAYQQGQNQLYNELNLGRREEYDVLDKRRGRDPEMGGKPRRKNPQEGLYNELQKDKMAEAYSEIGMKGERRRGKGHDGLYQGLSTATKDTYDALHMQALPPRGSGEGRGSLLTCGDVEENPGPMALPVTALLLPLALLLHAARPNWVNVISDLKKIEDLIQSMHIDATLYTESDVHPSCKVTAMKCFLLELQVISLESGDASIHDTVENLIILANNSLSSNGNVTESGCKECEELEEKNIKEFLQSFVHIVQMFINTSTTTPAPRPPTPAPTIASQPLSLRPEACRPAAGGAVHTRGLDFACDIYIWAPLAGTCGVLLLSLVITLYC

SEQ ID NO: 419 - protein, 722 aa, synthetic construct
MALPVTALLLPLALLLHAARPDYKDDDDKGGGGSGGGGSQVQLVQSGAEVKKPGASVKVSCKASGYTFTSYYMHWVRQAPGQGLEWMGIIDPSGGRTIYAQRFQGRVTMTRDTSTSTVYMELSSLRSEDTAVYYCARHEAGGIFDYWGQGTLVTVSSGGGGSGGGGSGGGGSDIQMTQSPSSLSASVGDRVTITCQASQDISNYLNWYQQKPGKAPKLLIYSASTLQSGVPSRFSGSGSGTDFTLTISSLQPEDFATYYCQQSYSSPYRFGQGTKVEIKTTTPAPRPPTPAPTIASQPLSLRPEACRPAAGGAVHTRGLDFACDIYIWAPLAGTCGVLLLSLVITLYCRRDQRLPPDAHKPPGGGSFRTPIQEEQADAHSTLAKIRVKFSRSADAPAYQQGQNQLYNELNLGRREEYDVLDKRRGRDPEMGGKPRRKNPQEGLYNELQKDKMAEAYSEIGMKGERRRGKGHDGLYQGLSTATKDTYDALHMQALPPRGSGEGRGSLLTCGDVEENPGPMALPVTALLLPLALLLHAARPNWVNVISDLKKIEDLIQSMHIDATLYTESDVHPSCKVTAMKCFLLELQVISLESGDASIHDTVENLIILANNSLSSNGNVTESGCKECEELEEKNIKEFLQSFVHIVQMFINTSTTTPAPRPPTPAPTIASQPLSLRPEACRPAAGGAVHTRGLDFACDIYIWAPLAGTCGVLLLSLVITLYC

SEQ ID NO: 420 - protein, 730 aa, synthetic construct
MALPVTALLLPLALLLHAARPDYKDDDDKGGGGSGGGGSQVQLVQSGAEVKKPGSSVKVSCKASGYTFSDSYMHWVRQAPGQGLEWVGGIIPMAGIPAYAEEFQGRVTITADESTSTAYMELSSLRSEDTAVYYCARADDYGGNWYFDLWGRGTLVTVSSGGGGSGGGGSGGGGSDIVMTQSPLSLPVTPGEPASISCRSSQSLLHSNGYNYLDWYLQKPGQSPQLLIYAASSLQSGVPDRFSGSGSGTDFTLKISRVEAEDVGVYYCMQGAHWPPTFGQGTKLEIKTTTPAPRPPTPAPTIASQPLSLRPEACRPAAGGAVHTRGLDFACDIYIWAPLAGTCGVLLLSLVITLYCRRDQRLPPDAHKPPGGGSFRTPIQEEQADAHSTLAKIRVKFSRSADAPAYQQGQNQLYNELNLGRREEYDVLDKRRGRDPEMGGKPRRKNPQEGLYNELQKDKMAEAYSEIGMKGERRRGKGHDGLYQGLSTATKDTYDALHMQALPPRGSGEGRGSLLTCGDVEENPGPMALPVTALLLPLALLLHAARPNWVNVISDLKKIEDLIQSMHIDATLYTESDVHPSCKVTAMKCFLLELQVISLESGDASIHDTVENLIILANNSLSSNGNVTESGCKECEELEEKNIKEFLQSFVHIVQMFINTSTTTPAPRPPTPAPTIASQPLSLRPEACRPAAGGAVHTRGLDFACDIYIWAPLAGTCGVLLLSLVITLYC

SEQ ID NO: 421 - protein, 724 aa, synthetic construct
MALPVTALLLPLALLLHAARPDYKDDDDKGGGGSGGGGSQVQLVQSGAEVKKPGASVKVSCKASGYIFTDYYMHWVRQAPGQGLEWMGIINPSGGSTSYAQKFQGRVTMTRDTSTSTVYMELSSLRSEDTAVYYCARDSGWYESWFDPWGQGTLVTVSSGGGGSGGGGSGGGGSDIQMTQSPSSLSASVGDRVTITCRASQDIRDGLGWYQQKPGKAPKLLIYAASTLQSGVPSRFSGSGSGTDFTLTISSLQPEDFATYYCQQSYGTPPTFGQGTKVEIKTTTPAPRPPTPAPTIASQPLSLRPEACRPAAGGAVHTRGLDFACDIYIWAPLAGTCGVLLLSLVITLYCRRDQRLPPDAHKPPGGGSFRTPIQEEQADAHSTLAKIRVKFSRSADAPAYQQGQNQLYNELNLGRREEYDVLDKRRGRDPEMGGKPRRKNPQEGLYNELQKDKMAEAYSEIGMKGERRRGKGHDGLYQGLSTATKDTYDALHMQALPPRGSGEGRGSLLTCGDVEENPGPMALPVTALLLPLALLLHAARPNWVNVISDLKKIEDLIQSMHIDATLYTESDVHPSCKVTAMKCFLLELQVISLESGDASIHDTVENLIILANNSLSSNGNVTESGCKECEELEEKNIKEFLQSFVHIVQMFINTSTTTPAPRPPTPAPTIASQPLSLRPEACRPAAGGAVHTRGLDFACDIYIWAPLAGTCGVLLLSLVITLYC

SEQ ID NO: 422 - protein, 725 aa, synthetic construct
MALPVTALLLPLALLLHAARPDYKDDDDKGGGGSGGGGSQVQLVQSGAEVKKPGASVKVSCKASGYTFTDYYLHWVRQAPGQGLEWMGWISAYNGNTNYAQKFQGRVTMTRDTSTSTVYMELSSLRSEDTAVYYCAREIVGATEDWYFDLWGRGTLVTVSSGGGGSGGGGSGGGGSEIVMTQSPATLSVSPGERATLSCRASQSVSSYLAWYQQKPGQAPRLLIYGASTRATGIPARFSGSGSGTEFTLTISSLQSEDFAVYYCQQYDSSPTFGQGTKVEIKTTTPAPRPPTPAPTIASQPLSLRPEACRPAAGGAVHTRGLDFACDIYIWAPLAGTCGVLLLSLVITLYCRRDQRLPPDAHKPPGGGSFRTPIQEEQADAHSTLAKIRVKFSRSADAPAYQQGQNQLYNELNLGRREEYDVLDKRRGRDPEMGGKPRRKNPQEGLYNELQKDKMAEAYSEIGMKGERRRGKGHDGLYQGLSTATKDTYDALHMQALPPRGSGEGRGSLLTCGDVEENPGPMALPVTALLLPLALLLHAARPNWVNVISDLKKIEDLIQSMHIDATLYTESDVHPSCKVTAMKCFLLELQVISLESGDASIHDTVENLIILANNSLSSNGNVTESGCKECEELEEKNIKEFLQSFVHIVQMFINTSTTTPAPRPPTPAPTIASQPLSLRPEACRPAAGGAVHTRGLDFACDIYIWAPLAGTCGVLLLSLVITLYC

SEQ ID NO: 423 - protein, 723 aa, synthetic construct
MALPVTALLLPLALLLHAARPDYKDDDDKGGGGSGGGGSQVQLVQSGAEVKKPGASVKVSCKASGYTFTAYYLHWVRQAPGQGLEWMGMINPNNGGTIYAQTFQGRVTMTRDTSTSTVYMELSSLRSEDTAVYYCARDLGGYVLFDYWGQGTLVTVSSGGGGSGGGGSGGGGSDIQMTQSPSSLSASVGDRVTITCRASQSISSYLNWYQQKPGKAPKLLIYDASNLETGVPSRFSGSGSGTDFTLTISSLQPEDFATYYCQQSHSAPITFGQGTRLEIKTTTPAPRPPTPAPTIASQPLSLRPEACRPAAGGAVHTRGLDFACDIYIWAPLAGTCGVLLLSLVITLYCRRDQRLPPDAHKPPGGGSFRTPIQEEQADAHSTLAKIRVKFSRSADAPAYQQGQNQLYNELNLGRREEYDVLDKRRGRDPEMGGKPRRKNPQEGLYNELQKDKMAEAYSEIGMKGERRRGKGHDGLYQGLSTATKDTYDALHMQALPPRGSGEGRGSLLTCGDVEENPGPMALPVTALLLPLALLLHAARPNWVNVISDLKKIEDLIQSMHIDATLYTESDVHPSCKVTAMKCFLLELQVISLESGDASIHDTVENLIILANNSLSSNGNVTESGCKECEELEEKNIKEFLQSFVHIVQMFINTSTTTPAPRPPTPAPTIASQPLSLRPEACRPAAGGAVHTRGLDFACDIYIWAPLAGTCGVLLLSLVITLYC

SEQ ID NO: 424 - protein, 723 aa, synthetic construct
MALPVTALLLPLALLLHAARPDYKDDDDKGGGGSGGGGSQVQLVQSGAEVKKPGASVKVSCKASGYTFTDYYIHWVRQAPGQGLEWMGMINPRGGSTTYAQSFQGRVTMTRDTSTSTVYMELSSLRSEDTAVYYCARDLGDYGDYDYWGQGTLVTVSSGGGGSGGGGSGGGGSDIQMTQSPSSLSASVGDRVTITCRASQSISTNLAWYQQKPGKAPKLLIYDASYLEAGVPSRFSGSGSGTDFTLTISSLQPEDFATYYCQQSYSTPPTFGQGTKLEIKTTTPAPRPPTPAPTIASQPLSLRPEACRPAAGGAVHTRGLDFACDIYIWAPLAGTCGVLLLSLVITLYCRRDQRLPPDAHKPPGGGSFRTPIQEEQADAHSTLAKIRVKFSRSADAPAYQQGQNQLYNELNLGRREEYDVLDKRRGRDPEMGGKPRRKNPQEGLYNELQKDKMAEAYSEIGMKGERRRGKGHDGLYQGLSTATKDTYDALHMQALPPRGSGEGRGSLLTCGDVEENPGPMALPVTALLLPLALLLHAARPNWVNVISDLKKIEDLIQSMHIDATLYTESDVHPSCKVTAMKCFLLELQVISLESGDASIHDTVENLIILANNSLSSNGNVTESGCKECEELEEKNIKEFLQSFVHIVQMFINTSTTTPAPRPPTPAPTIASQPLSLRPEACRPAAGGAVHTRGLDFACDIYIWAPLAGTCGVLLLSLVITLYC

SEQ ID NO: 425 - protein, 734 aa, synthetic construct
MALPVTALLLPLALLLHAARPDYKDDDDKGGGGSGGGGSEVQLLESGGGLVQPGGSLRLSCAASGFTFSNSDMNWVRQAPGKGLEWVSAISGGGDTLYYADSVKGRFTISRDNSKNTLYLQMNSLRAEDTAVYYCAMASALDSSGDNEAFDIWGQGTTVTVSSGGGGSGGGGSGGGGSDIVMTQSPDSLAVSLGERATINCKSSQSVLYSSNNKNYLAWYQQKPGQPPKLLIYWASTRDSGVPDRFSGSGSGTDFTLTISSLQAEDVAVYYCQQYYGFPPTFGQGTRLEIKTTTPAPRPPTPAPTIASQPLSLRPEACRPAAGGAVHTRGLDFACDIYIWAPLAGTCGVLLLSLVITLYCRRDQRLPPDAHKPPGGGSFRTPIQEEQADAHSTLAKIRVKFSRSADAPAYQQGQNQLYNELNLGRREEYDVLDKRRGRDPEMGGKPRRKNPQEGLYNELQKDKMAEAYSEIGMKGERRRGKGHDGLYQGLSTATKDTYDALHMQALPPRGSGEGRGSLLTCGDVEENPGPMALPVTALLLPLALLLHAARPNWVNVISDLKKIEDLIQSMHIDATLYTESDVHPSCKVTAMKCFLLELQVISLESGDASIHDTVENLIILANNSLSSNGNVTESGCKECEELEEKNIKEFLQSFVHIVQMFINTSTTTPAPRPPTPAPTIASQPLSLRPEACRPAAGGAVHTRGLDFACDIYIWAPLAGTCGVLLLSLVITLYC

SEQ ID NO: 426 - protein, 726 aa, synthetic construct
MALPVTALLLPLALLLHAARPDYKDDDDKGGGGSGGGGSQVQLVQSGAEVKKPGASVKVSCKASGYTFTSYYMHWVRQAPGQGLEWMGWINPNNGGTSYAQKFQGRVTMTRDTSTSTVYMELSSLRSEDTAVYYCARVEDDFWSGPSFDYWGQGTLVTVSSGGGGSGGGGSGGGGSDIQMTQSPSSLSASVGDRVTITCQASHDISKFLNWYQQKPGKAPKLLIYDASNLQRGVPSRFSGSGSGTDFTLTISSLQPEDFATYYCQQTYSFPFTFGQGTKLEIKTTTPAPRPPTPAPTIASQPLSLRPEACRPAAGGAVHTRGLDFACDIYIWAPLAGTCGVLLLSLVITLYCRRDQRLPPDAHKPPGGGSFRTPIQEEQADAHSTLAKIRVKFSRSADAPAYQQGQNQLYNELNLGRREEYDVLDKRRGRDPEMGGKPRRKNPQEGLYNELQKDKMAEAYSEIGMKGERRRGKGHDGLYQGLSTATKDTYDALHMQALPPRGSGEGRGSLLTCGDVEENPGPMALPVTALLLPLALLLHAARPNWVNVISDLKKIEDLIQSMHIDATLYTESDVHPSCKVTAMKCFLLELQVISLESGDASIHDTVENLIILANNSLSSNGNVTESGCKECEELEEKNIKEFLQSFVHIVQMFINTSTTTPAPRPPTPAPTIASQPLSLRPEACRPAAGGAVHTRGLDFACDIYIWAPLAGTCGVLLLSLVITLYC

SEQ ID NO: 427 - protein, 728 aa, synthetic construct
MALPVTALLLPLALLLHAARPDYKDDDDKGGGGSGGGGSQVQLVQSGAEVKKPGSSVKVSCKASGGTFTNYAFSWVRQAPGQGLEWMGGIIPISGAANYAQKFQGRVTITADESTSTAYMELSSLRSEDTAVYYCARGSGLDDAFDIWGQGTMVTVSSGGGGSGGGGSGGGGSDIVMTQSPLSLPVTPGEPASISCRSSQSLLHSNGYNYLDWYLQKPGQSPQLLIYDASSLQSGVPDRFSGSGSGTDFTLKISRVEAEDVGVYYCMQARQTPLTFGQGTRLEIKTTTPAPRPPTPAPTIASQPLSLRPEACRPAAGGAVHTRGLDFACDIYIWAPLAGTCGVLLLSLVITLYCRRDQRLPPDAHKPPGGGSFRTPIQEEQADAHSTLAKIRVKFSRSADAPAYQQGQNQLYNELNLGRREEYDVLDKRRGRDPEMGGKPRRKNPQEGLYNELQKDKMAEAYSEIGMKGERRRGKGHDGLYQGLSTATKDTYDALHMQALPPRGSGEGRGSLLTCGDVEENPGPMALPVTALLLPLALLLHAARPNWVNVISDLKKIEDLIQSMHIDATLYTESDVHPSCKVTAMKCFLLELQVISLESGDASIHDTVENLIILANNSLSSNGNVTESGCKECEELEEKNIKEFLQSFVHIVQMFINTSTTTPAPRPPTPAPTIASQPLSLRPEACRPAAGGAVHTRGLDFACDIYIWAPLAGTCGVLLLSLVITLYC

SEQ ID NO: 428 - protein, 738 aa, synthetic construct
MALPVTALLLPLALLLHAARPDYKDDDDKGGGGSGGGGSQVQLVQSGAEVKKPGASVKVSCKASGYTFTAYYMHWVRQAPGQGLEWMGWMNPNSGNTGYAQKFQGRVTMTRDTSTSTVYMELSSLRSEDTAVYYCAREGRIDYGDYDDYYYYYGMDVWGQGTTVTVSSGGGGSGGGGSGGGGSDIVMTQSPLSLPVTPGEPASISCRSSQSLLHSNGYNYLDWYLQKPGQSPQLLIYAASNLQGGVPDRFSGSGSGTDFTLKISRVEAEDVGVYYCMQTLESPVTFGGGTKVEIKTTTPAPRPPTPAPTIASQPLSLRPEACRPAAGGAVHTRGLDFACDIYIWAPLAGTCGVLLLSLVITLYCRRDQRLPPDAHKPPGGGSFRTPIQEEQADAHSTLAKIRVKFSRSADAPAYQQGQNQLYNELNLGRREEYDVLDKRRGRDPEMGGKPRRKNPQEGLYNELQKDKMAEAYSEIGMKGERRRGKGHDGLYQGLSTATKDTYDALHMQALPPRGSGEGRGSLLTCGDVEENPGPMALPVTALLLPLALLLHAARPNWVNVISDLKKIEDLIQSMHIDATLYTESDVHPSCKVTAMKCFLLELQVISLESGDASIHDTVENLIILANNSLSSNGNVTESGCKECEELEEKNIKEFLQSFVHIVQMFINTSTTTPAPRPPTPAPTIASQPLSLRPEACRPAAGGAVHTRGLDFACDIYIWAPLAGTCGVLLLSLVITLYC

SEQ ID NO: 429 - protein, 724 aa, synthetic construct
MALPVTALLLPLALLLHAARPDYKDDDDKGGGGSGGGGSQVQLVQSGAEVKKPGASVKVSCKASGYTFTDYYVHWVRQAPGQGLEWMGTINPSGGSTSYAQKFQGRVTMTRDTSTSTVYMELSSLRSEDTAVYYCARDQGLWFTGFDYWGQGTLVTVSSGGGGSGGGGSGGGGSDIQMTQSPSSLSASVGDRVTITCRASQGISNNLNWYQQKPGKAPKLLIYDASNLERGVPSRFSGSGSGTDFTLTISSLQPEDFATYYCQQSYDGPITFGQGTRLEIKTTTPAPRPPTPAPTIASQPLSLRPEACRPAAGGAVHTRGLDFACDIYIWAPLAGTCGVLLLSLVITLYCRRDQRLPPDAHKPPGGGSFRTPIQEEQADAHSTLAKIRVKFSRSADAPAYQQGQNQLYNELNLGRREEYDVLDKRRGRDPEMGGKPRRKNPQEGLYNELQKDKMAEAYSEIGMKGERRRGKGHDGLYQGLSTATKDTYDALHMQALPPRGSGEGRGSLLTCGDVEENPGPMALPVTALLLPLALLLHAARPNWVNVISDLKKIEDLIQSMHIDATLYTESDVHPSCKVTAMKCFLLELQVISLESGDASIHDTVENLIILANNSLSSNGNVTESGCKECEELEEKNIKEFLQSFVHIVQMFINTSTTTPAPRPPTPAPTIASQPLSLRPEACRPAAGGAVHTRGLDFACDIYIWAPLAGTCGVLLLSLVITLYC

SEQ ID NO: 430 - protein, 724 aa, synthetic construct
MALPVTALLLPLALLLHAARPDYKDDDDKGGGGSGGGGSQVQLVQSGAEVKKPGASVKVSCKASGYTFTAYHMHWVRQAPGQGLEWMGIINPGDGATGYAQNLQGRVTMTRDTSTSTVYMELSSLRSEDTAVYYCAGEGISGSDAFDIWGQGTLVTVSSGGGGSGGGGSGGGGSDIQMTQSPSSLSASVGDRVTITCRASQSISSWLAWYQQKPGKAPKLLIYAASSLQSGVPSRFSGSGSGTDFTLTISSLQPEDFATYYCLQDYSYPLTFGGGTKVEIKTTTPAPRPPTPAPTIASQPLSLRPEACRPAAGGAVHTRGLDFACDIYIWAPLAGTCGVLLLSLVITLYCRRDQRLPPDAHKPPGGGSFRTPIQEEQADAHSTLAKIRVKFSRSADAPAYQQGQNQLYNELNLGRREEYDVLDKRRGRDPEMGGKPRRKNPQEGLYNELQKDKMAEAYSEIGMKGERRRGKGHDGLYQGLSTATKDTYDALHMQALPPRGSGEGRGSLLTCGDVEENPGPMALPVTALLLPLALLLHAARPNWVNVISDLKKIEDLIQSMHIDATLYTESDVHPSCKVTAMKCFLLELQVISLESGDASIHDTVENLIILANNSLSSNGNVTESGCKECEELEEKNIKEFLQSFVHIVQMFINTSTTTPAPRPPTPAPTIASQPLSLRPEACRPAAGGAVHTRGLDFACDIYIWAPLAGTCGVLLLSLVITLYC

SEQ ID NO: 431 - protein, 722 aa, synthetic construct
MALPVTALLLPLALLLHAARPDYKDDDDKGGGGSGGGGSQVQLVQSGAEVKKPGSSVKVSCKASGGTFSSYAISWVRQAPGQGLEWMGWMNPNSGNTGYAQKFQGRVTITADESTSTAYMELSSLRSEDTAVYYCAWGVDPYYFDYWGQGTLVTVSSGGGGSGGGGSGGGGSDIQMTQSPSSLSASVGDRVTITCRASQSINRWLAWYQQKPGKAPKLLIYDASNLETGVPSRFSGSGSGTDFTLTISSLQPEDFATYYCQQSYITPLTFGGGTKVEIKTTTPAPRPPTPAPTIASQPLSLRPEACRPAAGGAVHTRGLDFACDIYIWAPLAGTCGVLLLSLVITLYCRRDQRLPPDAHKPPGGGSFRTPIQEEQADAHSTLAKIRVKFSRSADAPAYQQGQNQLYNELNLGRREEYDVLDKRRGRDPEMGGKPRRKNPQEGLYNELQKDKMAEAYSEIGMKGERRRGKGHDGLYQGLSTATKDTYDALHMQALPPRGSGEGRGSLLTCGDVEENPGPMALPVTALLLPLALLLHAARPNWVNVISDLKKIEDLIQSMHIDATLYTESDVHPSCKVTAMKCFLLELQVISLESGDASIHDTVENLIILANNSLSSNGNVTESGCKECEELEEKNIKEFLQSFVHIVQMFINTSTTTPAPRPPTPAPTIASQPLSLRPEACRPAAGGAVHTRGLDFACDIYIWAPLAGTCGVLLLSLVITLYC

SEQ ID NO: 432 - protein, 722 aa, synthetic construct
MALPVTALLLPLALLLHAARPDYKDDDDKGGGGSGGGGSQVQLVQSGAEVKKPGASVKVSCKASGYTFTSYYMHWVRQAPGQGLEWMGIFNPSDGSTSYAQKFQGRVTMTRDTSTSTVYMELSSLRSEDTAVYYCARDVGETTFDPWGQGTLVTVSSGGGGSGGGGSGGGGSDIQMTQSPSSLSASVGDRVTITCQASQDISNYLNWYQQKPGKAPKLLIYDASSLESGVPSRFSGSGSGTDFTLTISSLQPEDFATYYCQQTNSFPITFGQGTRLEIKTTTPAPRPPTPAPTIASQPLSLRPEACRPAAGGAVHTRGLDFACDIYIWAPLAGTCGVLLLSLVITLYCRRDQRLPPDAHKPPGGGSFRTPIQEEQADAHSTLAKIRVKFSRSADAPAYQQGQNQLYNELNLGRREEYDVLDKRRGRDPEMGGKPRRKNPQEGLYNELQKDKMAEAYSEIGMKGERRRGKGHDGLYQGLSTATKDTYDALHMQALPPRGSGEGRGSLLTCGDVEENPGPMALPVTALLLPLALLLHAARPNWVNVISDLKKIEDLIQSMHIDATLYTESDVHPSCKVTAMKCFLLELQVISLESGDASIHDTVENLIILANNSLSSNGNVTESGCKECEELEEKNIKEFLQSFVHIVQMFINTSTTTPAPRPPTPAPTIASQPLSLRPEACRPAAGGAVHTRGLDFACDIYIWAPLAGTCGVLLLSLVITLYC

SEQ ID NO: 433 - protein, 727 aa, synthetic construct
MALPVTALLLPLALLLHAARPDYKDDDDKGGGGSGGGGSQVQLVQSGAEVKKPGASVKVSCKASGYTFTSYGISWVRQAPGQGLEWMGWISAYNGHTNYAQKFQGRVTMTRDTSTSTVYMELSSLRSEDTAVYYCARDSVRGWDYYYGMGVWGQGTTVTVSSGGGGSGGGGSGGGGSDIQMTQSPSSLSASVGDRVTITCQASQDIRNFLNWYQQKPGKAPKLLIYAASTLQSGVPSRFSGSGSGTDFTLTISSLQPEDFATYYCQQSYSAPSTFGQGTKLEIKTTTPAPRPPTPAPTIASQPLSLRPEACRPAAGGAVHTRGLDFACDIYIWAPLAGTCGVLLLSLVITLYCRRDQRLPPDAHKPPGGGSFRTPIQEEQADAHSTLAKIRVKFSRSADAPAYQQGQNQLYNELNLGRREEYDVLDKRRGRDPEMGGKPRRKNPQEGLYNELQKDKMAEAYSEIGMKGERRRGKGHDGLYQGLSTATKDTYDALHMQALPPRGSGEGRGSLLTCGDVEENPGPMALPVTALLLPLALLLHAARPNWVNVISDLKKIEDLIQSMHIDATLYTESDVHPSCKVTAMKCFLLELQVISLESGDASIHDTVENLIILANNSLSSNGNVTESGCKECEELEEKNIKEFLQSFVHIVQMFINTSTTTPAPRPPTPAPTIASQPLSLRPEACRPAAGGAVHTRGLDFACDIYIWAPLAGTCGVLLLSLVITLYC

SEQ ID NO: 434 - protein, 724 aa, synthetic construct
MALPVTALLLPLALLLHAARPDYKDDDDKGGGGSGGGGSQVQLVQSGAEVKKPGSSVKVSCKASGYTFIDYYMHWVRQAPGQGLEWMGWMNPHSGNSDNAPKFQGRVTITADESTSTAYMELSSLRSEDTAVYYCARGYSGYDLTADYWGQGTLVTVSSGGGGSGGGGSGGGGSDIQMTQSPSSLSASVGDRVTITCRASQSISNYLNWYQQKPGKAPKLLIYDASNLETGVPSRFSGSGSGTDFTLTISSLQPEDFATYYCQQSYSTPITFGQGTRLEIKTTTPAPRPPTPAPTIASQPLSLRPEACRPAAGGAVHTRGLDFACDIYIWAPLAGTCGVLLLSLVITLYCRRDQRLPPDAHKPPGGGSFRTPIQEEQADAHSTLAKIRVKFSRSADAPAYQQGQNQLYNELNLGRREEYDVLDKRRGRDPEMGGKPRRKNPQEGLYNELQKDKMAEAYSEIGMKGERRRGKGHDGLYQGLSTATKDTYDALHMQALPPRGSGEGRGSLLTCGDVEENPGPMALPVTALLLPLALLLHAARPNWVNVISDLKKIEDLIQSMHIDATLYTESDVHPSCKVTAMKCFLLELQVISLESGDASIHDTVENLIILANNSLSSNGNVTESGCKECEELEEKNIKEFLQSFVHIVQMFINTSTTTPAPRPPTPAPTIASQPLSLRPEACRPAAGGAVHTRGLDFACDIYIWAPLAGTCGVLLLSLVITLYC

SEQ ID NO: 435 - protein, 733 aa, synthetic construct
MALPVTALLLPLALLLHAARPDYKDDDDKGGGGSGGGGSQVQLVQSGAEVKKPGASVKVSCKASGYTFTGQYMHWVRQAPGQGLEWMGWINPNTGDTNYAQKFQGRVTMTRDTSTSTVYMELSSLRSEDTAVYYCARDSVFEVEGGTDYYYYYGMDVWGQGTMVTVSSGGGGSGGGGSGGGGSDIQMTQSPSSLSASVGDRVTITCRASETISGWLAWYQQKPGKAPKLLIYDASNLETGVPSRFSGSGSGTDFTLTISSLQPEDFATYYCQQSYSTPWTFGQGTKLEIKTTTPAPRPPTPAPTIASQPLSLRPEACRPAAGGAVHTRGLDFACDIYIWAPLAGTCGVLLLSLVITLYCRRDQRLPPDAHKPPGGGSFRTPIQEEQADAHSTLAKIRVKFSRSADAPAYQQGQNQLYNELNLGRREEYDVLDKRRGRDPEMGGKPRRKNPQEGLYNELQKDKMAEAYSEIGMKGERRRGKGHDGLYQGLSTATKDTYDALHMQALPPRGSGEGRGSLLTCGDVEENPGPMALPVTALLLPLALLLHAARPNWVNVISDLKKIEDLIQSMHIDATLYTESDVHPSCKVTAMKCFLLELQVISLESGDASIHDTVENLIILANNSLSSNGNVTESGCKECEELEEKNIKEFLQSFVHIVQMFINTSTTTPAPRPPTPAPTIASQPLSLRPEACRPAAGGAVHTRGLDFACDIYIWAPLAGTCGVLLLSLVITLYC

SEQ ID NO: 436 - protein, 723 aa, synthetic construct
MALPVTALLLPLALLLHAARPDYKDDDDKGGGGSGGGGSQVQLVQSGAEVKKPGASVKVSCKASGYTFTSYDINWVRQAPGQGLEWMGVINPSGGGTSYAQKFQGRVTMTRDTSTSTVYMELSSLRSEDTAVYYCARYSGYDWVFDYWGQGTLVTVSSGGGGSGGGGSGGGGSDIQMTQSPSSLSASVGDRVTITCRASQGIGSWLAWYQQKPGKAPKLLIYAASTLQSGVPSRFSGSGSGTDFTLTISSLQPEDFATYYCQQSYSTPWTFGPGTKVDIKTTTPAPRPPTPAPTIASQPLSLRPEACRPAAGGAVHTRGLDFACDIYIWAPLAGTCGVLLLSLVITLYCRRDQRLPPDAHKPPGGGSFRTPIQEEQADAHSTLAKIRVKFSRSADAPAYQQGQNQLYNELNLGRREEYDVLDKRRGRDPEMGGKPRRKNPQEGLYNELQKDKMAEAYSEIGMKGERRRGKGHDGLYQGLSTATKDTYDALHMQALPPRGSGEGRGSLLTCGDVEENPGPMALPVTALLLPLALLLHAARPNWVNVISDLKKIEDLIQSMHIDATLYTESDVHPSCKVTAMKCFLLELQVISLESGDASIHDTVENLIILANNSLSSNGNVTESGCKECEELEEKNIKEFLQSFVHIVQMFINTSTTTPAPRPPTPAPTIASQPLSLRPEACRPAAGGAVHTRGLDFACDIYIWAPLAGTCGVLLLSLVITLYC

SEQ ID NO: 437 - protein, 724 aa, synthetic construct
MALPVTALLLPLALLLHAARPDYKDDDDKGGGGSGGGGSQVQLVQSGAEVKKPGASVKVSCKASGYTFANYYMHWVRQAPGQGLEWMGIINPSGGSTSYAQKFQGRVTMTRDTSTSTVYMELSSLRSEDTAVYYCARDSGSYFGWFDPWGQGTLVTVSSGGGGSGGGGSGGGGSDIQMTQSPSSLSASVGDRVTITCRASQSISSSLAWYQQKPGKAPKLLIYDASSLQSGVPSRFSGSGSGTDFTLTISSLQPEDFATYYCQQSYNTPPTFGGGTKLEIKTTTPAPRPPTPAPTIASQPLSLRPEACRPAAGGAVHTRGLDFACDIYIWAPLAGTCGVLLLSLVITLYCRRDQRLPPDAHKPPGGGSFRTPIQEEQADAHSTLAKIRVKFSRSADAPAYQQGQNQLYNELNLGRREEYDVLDKRRGRDPEMGGKPRRKNPQEGLYNELQKDKMAEAYSEIGMKGERRRGKGHDGLYQGLSTATKDTYDALHMQALPPRGSGEGRGSLLTCGDVEENPGPMALPVTALLLPLALLLHAARPNWVNVISDLKKIEDLIQSMHIDATLYTESDVHPSCKVTAMKCFLLELQVISLESGDASIHDTVENLIILANNSLSSNGNVTESGCKECEELEEKNIKEFLQSFVHIVQMFINTSTTTPAPRPPTPAPTIASQPLSLRPEACRPAAGGAVHTRGLDFACDIYIWAPLAGTCGVLLLSLVITLYC

SEQ ID NO: 438 - protein, 724 aa, synthetic construct
MALPVTALLLPLALLLHAARPDYKDDDDKGGGGSGGGGSQVQLVQSGAEVKKPGASVKVSCKASGYTFTTYYMHWVRQAPGQGLEWMGIINPTGGSTYYAQKFQGRVTMTRDTSTSTVYMELSSLRSEDTAVYYCARDSGNYQGIFDYWGQGTLVTVSSGGGGSGGGGSGGGGSDIQMTQSPSSLSASVGDRVTITCRASQGIGGYLAWYQQKPGKAPKLLIYDASNLETGVPSRFSGSGSGTDFTLTISSLQPEDFATYYCQQSYDSPPTFGQGTRLEIKTTTPAPRPPTPAPTIASQPLSLRPEACRPAAGGAVHTRGLDFACDIYIWAPLAGTCGVLLLSLVITLYCRRDQRLPPDAHKPPGGGSFRTPIQEEQADAHSTLAKIRVKFSRSADAPAYQQGQNQLYNELNLGRREEYDVLDKRRGRDPEMGGKPRRKNPQEGLYNELQKDKMAEAYSEIGMKGERRRGKGHDGLYQGLSTATKDTYDALHMQALPPRGSGEGRGSLLTCGDVEENPGPMALPVTALLLPLALLLHAARPNWVNVISDLKKIEDLIQSMHIDATLYTESDVHPSCKVTAMKCFLLELQVISLESGDASIHDTVENLIILANNSLSSNGNVTESGCKECEELEEKNIKEFLQSFVHIVQMFINTSTTTPAPRPPTPAPTIASQPLSLRPEACRPAAGGAVHTRGLDFACDIYIWAPLAGTCGVLLLSLVITLYC

SEQ ID NO: 439 - protein, 723 aa, synthetic construct
MALPVTALLLPLALLLHAARPDYKDDDDKGGGGSGGGGSQVQLVQSGAEVKKPGASVKVSCKASGNTFTSYYMHWVRQAPGQGLEWMGWINPNSGDTNYAQNFQGRVTMTRDTSTSTVYMELSSLRSEDTAVYYCARGVSGYDLFDYWGQGTLVTVSSGGGGSGGGGSGGGGSDIQMTQSPSSLSASVGDRVTITCRASQSVSSYLNWYQQKPGKAPKLLIYDTSNLETGVPSRFSGSGSGTDFTLTISSLQPEDFATYYCQQAHSFPLTFGGGTKVEIKTTTPAPRPPTPAPTIASQPLSLRPEACRPAAGGAVHTRGLDFACDIYIWAPLAGTCGVLLLSLVITLYCRRDQRLPPDAHKPPGGGSFRTPIQEEQADAHSTLAKIRVKFSRSADAPAYQQGQNQLYNELNLGRREEYDVLDKRRGRDPEMGGKPRRKNPQEGLYNELQKDKMAEAYSEIGMKGERRRGKGHDGLYQGLSTATKDTYDALHMQALPPRGSGEGRGSLLTCGDVEENPGPMALPVTALLLPLALLLHAARPNWVNVISDLKKIEDLIQSMHIDATLYTESDVHPSCKVTAMKCFLLELQVISLESGDASIHDTVENLIILANNSLSSNGNVTESGCKECEELEEKNIKEFLQSFVHIVQMFINTSTTTPAPRPPTPAPTIASQPLSLRPEACRPAAGGAVHTRGLDFACDIYIWAPLAGTCGVLLLSLVITLYC

SEQ ID NO: 440 - protein, 723 aa, synthetic construct
MALPVTALLLPLALLLHAARPDYKDDDDKGGGGSGGGGSEVQLVESGGGLVKPGGSLRLSCAASGFTFSSYGMHWVRQAPGKGLEWVASIKHDGSEQYYVDSVKGRFTISRDDSKNTLYLQMNSLKTEDTAVYYCAASGVDVWGQGTTVTVSSGGGGSGGGGSGGGGSDIVMTQSPLSLPVTPGEPASISCRSSQSLLHSNGYNYLDWYLQKPGQSPQLLIYLGSTRASGVPDRFSGSGSGTDFTLKISRVEAEDVGVYYCMQALDTPLTFGGGTKLEIKTTTPAPRPPTPAPTIASQPLSLRPEACRPAAGGAVHTRGLDFACDIYIWAPLAGTCGVLLLSLVITLYCRRDQRLPPDAHKPPGGGSFRTPIQEEQADAHSTLAKIRVKFSRSADAPAYQQGQNQLYNELNLGRREEYDVLDKRRGRDPEMGGKPRRKNPQEGLYNELQKDKMAEAYSEIGMKGERRRGKGHDGLYQGLSTATKDTYDALHMQALPPRGSGEGRGSLLTCGDVEENPGPMALPVTALLLPLALLLHAARPNWVNVISDLKKIEDLIQSMHIDATLYTESDVHPSCKVTAMKCFLLELQVISLESGDASIHDTVENLIILANNSLSSNGNVTESGCKECEELEEKNIKEFLQSFVHIVQMFINTSTTTPAPRPPTPAPTIASQPLSLRPEACRPAAGGAVHTRGLDFACDIYIWAPLAGTCGVLLLSLVITLYC

SEQ ID NO: 441 - protein, 726 aa, synthetic construct
MALPVTALLLPLALLLHAARPDYKDDDDKGGGGSGGGGSQVQLVQSGAEVKKPGASVKVSCKASGGTFSRYDINWVRQAPGQGLEWVGIIDPTGASTSYAQKFQGRVTMTRDTSTSTVYMELSSLRSEDTAVYYCARDYSYGMDYYGMDVWGQGTLVTVSSGGGGSGGGGSGGGGSDIQMTQSPSSLSASVGDRVTITCQASQDISNYLNWYQQKPGKAPKLLIYDTSNLQTGVPSRFSGSGSGTDFTLTISSLQPEDFATYYLSTDLQTTAHFGQGTKVEIKTTTPAPRPPTPAPTIASQPLSLRPEACRPAAGGAVHTRGLDFACDIYIWAPLAGTCGVLLLSLVITLYCRRDQRLPPDAHKPPGGGSFRTPIQEEQADAHSTLAKIRVKFSRSADAPAYQQGQNQLYNELNLGRREEYDVLDKRRGRDPEMGGKPRRKNPQEGLYNELQKDKMAEAYSEIGMKGERRRGKGHDGLYQGLSTATKDTYDALHMQALPPRGSGEGRGSLLTCGDVEENPGPMALPVTALLLPLALLLHAARPNWVNVISDLKKIEDLIQSMHIDATLYTESDVHPSCKVTAMKCFLLELQVISLESGDASIHDTVENLIILANNSLSSNGNVTESGCKECEELEEKNIKEFLQSFVHIVQMFINTSTTTPAPRPPTPAPTIASQPLSLRPEACRPAAGGAVHTRGLDFACDIYIWAPLAGTCGVLLLSLVITLYC

SEQ ID NO: 442 - protein, 728 aa, synthetic construct
MALPVTALLLPLALLLHAARPDYKDDDDKGGGGSGGGGSQVQLVQSGAEVKKPGSSVKVSCKASGYTFTSYGISWVRQAPGQGLEWMGGIIPIFGTTNYAQKFQGRVTITADESTSTAYMELSSLRSEDTAVYYCARDHSGDGYFDLWGRGTLVTVSSGGGGSGGGGSGGGGSDIVMTQSPLSLPVTPGEPASISCRSSQSLLHSNGYNYLDWYLQKPGQSPQLLIYDASSLQSGVPDRFSGSGSGTDFTLKISRVEAEDVGVYYCMQGTHWPPTFGQGTKVEIKTTTPAPRPPTPAPTIASQPLSLRPEACRPAAGGAVHTRGLDFACDIYIWAPLAGTCGVLLLSLVITLYCRRDQRLPPDAHKPPGGGSFRTPIQEEQADAHSTLAKIRVKFSRSADAPAYQQGQNQLYNELNLGRREEYDVLDKRRGRDPEMGGKPRRKNPQEGLYNELQKDKMAEAYSEIGMKGERRRGKGHDGLYQGLSTATKDTYDALHMQALPPRGSGEGRGSLLTCGDVEENPGPMALPVTALLLPLALLLHAARPNWVNVISDLKKIEDLIQSMHIDATLYTESDVHPSCKVTAMKCFLLELQVISLESGDASIHDTVENLIILANNSLSSNGNVTESGCKECEELEEKNIKEFLQSFVHIVQMFINTSTTTPAPRPPTPAPTIASQPLSLRPEACRPAAGGAVHTRGLDFACDIYIWAPLAGTCGVLLLSLVITLYC

SEQ ID NO: 443 - protein, 722 aa, synthetic construct
MALPVTALLLPLALLLHAARPDYKDDDDKGGGGSGGGGSQVQLVQSGAEVKKPGASVKVSCKASGYTFTENEMHWVRQAPGQGLEWMGWINPNSGGTNYAQKFQGRVTMTRDTSTSTVYMELSSLRSEDTAVYYCAGSWGGYYFDYWGQGTLVTVSSGGGGSGGGGSGGGGSDIQMTQSPSSLSASVGDRVTITCRASQSVSRYLNWYQQKPGKAPKLLIYDASNLETGVPSRFSGSGSGTDFTLTISSLQPEDFATYYCQQADSFPVTFGQGTKLEIKTTTPAPRPPTPAPTIASQPLSLRPEACRPAAGGAVHTRGLDFACDIYIWAPLAGTCGVLLLSLVITLYCRRDQRLPPDAHKPPGGGSFRTPIQEEQADAHSTLAKIRVKFSRSADAPAYQQGQNQLYNELNLGRREEYDVLDKRRGRDPEMGGKPRRKNPQEGLYNELQKDKMAEAYSEIGMKGERRRGKGHDGLYQGLSTATKDTYDALHMQALPPRGSGEGRGSLLTCGDVEENPGPMALPVTALLLPLALLLHAARPNWVNVISDLKKIEDLIQSMHIDATLYTESDVHPSCKVTAMKCFLLELQVISLESGDASIHDTVENLIILANNSLSSNGNVTESGCKECEELEEKNIKEFLQSFVHIVQMFINTSTTTPAPRPPTPAPTIASQPLSLRPEACRPAAGGAVHTRGLDFACDIYIWAPLAGTCGVLLLSLVITLYC

SEQ ID NO: 444 - protein, 725 aa, synthetic construct
MALPVTALLLPLALLLHAARPDYKDDDDKGGGGSGGGGSQVQLVQSGAEVKKPGASVKVSCKASGYTFTNYYIYWVRQAPGQGLEWMGWINPNDGATNYAQKFQGRVTMTRDTSTSTVYMELSSLRSEDTAVYYCAREGNDYYYYFMDYWGQGTLVTVSSGGGGSGGGGSGGGGSDIQMTQSPSSLSASVGDRVTITCRASQGISNNLNWYQQKPGKAPKLLIYHASNLETGVPSRFSGSGSGTDFTLTISSLQPEDFATYYCQQSYDGPMTFGQGTKLEIKTTTPAPRPPTPAPTIASQPLSLRPEACRPAAGGAVHTRGLDFACDIYIWAPLAGTCGVLLLSLVITLYCRRDQRLPPDAHKPPGGGSFRTPIQEEQADAHSTLAKIRVKFSRSADAPAYQQGQNQLYNELNLGRREEYDVLDKRRGRDPEMGGKPRRKNPQEGLYNELQKDKMAEAYSEIGMKGERRRGKGHDGLYQGLSTATKDTYDALHMQALPPRGSGEGRGSLLTCGDVEENPGPMALPVTALLLPLALLLHAARPNWVNVISDLKKIEDLIQSMHIDATLYTESDVHPSCKVTAMKCFLLELQVISLESGDASIHDTVENLIILANNSLSSNGNVTESGCKECEELEEKNIKEFLQSFVHIVQMFINTSTTTPAPRPPTPAPTIASQPLSLRPEACRPAAGGAVHTRGLDFACDIYIWAPLAGTCGVLLLSLVITLYC

SEQ ID NO: 445 - protein, 731 aa, synthetic construct
MALPVTALLLPLALLLHAARPDYKDDDDKGGGGSGGGGSQVQLVQSGAEVKKPGSSVKVSCKASGGTFSSYAISWVRQAPGQGLEWMGGITPMFGTTDYAQKFQGRVTITADESTSTAYMELSSLRSEDTAVYYCARDERDGYATVAFDIWGQGTMVTVSSGGGGSGGGGSGGGGSDIVMTQSPLSLPVTPGEPASISCRSSQSLLHSNGYNYLDWYLQKPGQSPQLLIYDASNLETGVPDRFSGSGSGTDFTLKISRVEAEDVGVYYCMQGTHWPPTFGQGTKVEIKTTTPAPRPPTPAPTIASQPLSLRPEACRPAAGGAVHTRGLDFACDIYIWAPLAGTCGVLLLSLVITLYCRRDQRLPPDAHKPPGGGSFRTPIQEEQADAHSTLAKIRVKFSRSADAPAYQQGQNQLYNELNLGRREEYDVLDKRRGRDPEMGGKPRRKNPQEGLYNELQKDKMAEAYSEIGMKGERRRGKGHDGLYQGLSTATKDTYDALHMQALPPRGSGEGRGSLLTCGDVEENPGPMALPVTALLLPLALLLHAARPNWVNVISDLKKIEDLIQSMHIDATLYTESDVHPSCKVTAMKCFLLELQVISLESGDASIHDTVENLIILANNSLSSNGNVTESGCKECEELEEKNIKEFLQSFVHIVQMFINTSTTTPAPRPPTPAPTIASQPLSLRPEACRPAAGGAVHTRGLDFACDIYIWAPLAGTCGVLLLSLVITLYC

SEQ ID NO: 446 - protein, 726 aa, synthetic construct
MALPVTALLLPLALLLHAARPDYKDDDDKGGGGSGGGGSQVQLVQSGAEVKKPGASVKVSCKASGYTFTSYYMHWVRQAPGQGLEWMGIINPSDGGTSYADKFQGRVTMTRDTSTSTVYMELSSLRSEDTAVYYCARALAPLGWGDGMDVWGQGTTVTVSSGGGGSGGGGSGGGGSDIQMTQSPSSLSASVGDRVTITCQASQDISNYLNWYQQKPGKAPKLLIYDASNLETGVPSRFSGSGSGTDFTLTISSLQPEDFATYYCQQSYDGPITFGQGTRLEIKTTTPAPRPPTPAPTIASQPLSLRPEACRPAAGGAVHTRGLDFACDIYIWAPLAGTCGVLLLSLVITLYCRRDQRLPPDAHKPPGGGSFRTPIQEEQADAHSTLAKIRVKFSRSADAPAYQQGQNQLYNELNLGRREEYDVLDKRRGRDPEMGGKPRRKNPQEGLYNELQKDKMAEAYSEIGMKGERRRGKGHDGLYQGLSTATKDTYDALHMQALPPRGSGEGRGSLLTCGDVEENPGPMALPVTALLLPLALLLHAARPNWVNVISDLKKIEDLIQSMHIDATLYTESDVHPSCKVTAMKCFLLELQVISLESGDASIHDTVENLIILANNSLSSNGNVTESGCKECEELEEKNIKEFLQSFVHIVQMFINTSTTTPAPRPPTPAPTIASQPLSLRPEACRPAAGGAVHTRGLDFACDIYIWAPLAGTCGVLLLSLVITLYC

SEQ ID NO: 447 - protein, 723 aa, synthetic construct
MALPVTALLLPLALLLHAARPDYKDDDDKGGGGSGGGGSQVQLVQSGAEVKKPGSSVKVSCKASGYTFTSYYIHWVRQAPGQGLEWMGWMNPSSGVTNFAQKFQGRVTITADESTSTAYMELSSLRSEDTAVYYCARGSDQGDWSDPWGQGTLVTVSSGGGGSGGGGSGGGGSDIQMTQSPSSLSASVGDRVTITCRASQSISSYLNWYQQKPGKAPKLLIYDASNLETGVPSRFSGSGSGTDFTLTISSLQPEDFATYYCQQSYNTPPTFGGGTKVEIKTTTPAPRPPTPAPTIASQPLSLRPEACRPAAGGAVHTRGLDFACDIYIWAPLAGTCGVLLLSLVITLYCRRDQRLPPDAHKPPGGGSFRTPIQEEQADAHSTLAKIRVKFSRSADAPAYQQGQNQLYNELNLGRREEYDVLDKRRGRDPEMGGKPRRKNPQEGLYNELQKDKMAEAYSEIGMKGERRRGKGHDGLYQGLSTATKDTYDALHMQALPPRGSGEGRGSLLTCGDVEENPGPMALPVTALLLPLALLLHAARPNWVNVISDLKKIEDLIQSMHIDATLYTESDVHPSCKVTAMKCFLLELQVISLESGDASIHDTVENLIILANNSLSSNGNVTESGCKECEELEEKNIKEFLQSFVHIVQMFINTSTTTPAPRPPTPAPTIASQPLSLRPEACRPAAGGAVHTRGLDFACDIYIWAPLAGTCGVLLLSLVITLYC

SEQ ID NO: 448 - protein, 726 aa, synthetic construct
MALPVTALLLPLALLLHAARPDYKDDDDKGGGGSGGGGSQVQLVQSGAEVKKPGASVKVSCKASGYTFTDSYIHWVRQAPGQGLEWIGWMNPNTGDTGYAQKFQGRVTMTRDTSTSTVYMELSSLRSEDTAVYYCAKDDFGELAPATFDPWGQGTLVTVSSGGGGSGGGGSGGGGSDIQMTQSPSSLSASVGDRVTITCQASQDISNYLNWYQQKPGKAPKLLIYGASSLQSGVPSRFSGSGSGTDFTLTISSLQPEDFATYYCLQDAATPITFGQGTRLEIKTTTPAPRPPTPAPTIASQPLSLRPEACRPAAGGAVHTRGLDFACDIYIWAPLAGTCGVLLLSLVITLYCRRDQRLPPDAHKPPGGGSFRTPIQEEQADAHSTLAKIRVKFSRSADAPAYQQGQNQLYNELNLGRREEYDVLDKRRGRDPEMGGKPRRKNPQEGLYNELQKDKMAEAYSEIGMKGERRRGKGHDGLYQGLSTATKDTYDALHMQALPPRGSGEGRGSLLTCGDVEENPGPMALPVTALLLPLALLLHAARPNWVNVISDLKKIEDLIQSMHIDATLYTESDVHPSCKVTAMKCFLLELQVISLESGDASIHDTVENLIILANNSLSSNGNVTESGCKECEELEEKNIKEFLQSFVHIVQMFINTSTTTPAPRPPTPAPTIASQPLSLRPEACRPAAGGAVHTRGLDFACDIYIWAPLAGTCGVLLLSLVITLYC

SEQ ID NO: 449 - protein, 726 aa, synthetic construct
MALPVTALLLPLALLLHAARPDYKDDDDKGGGGSGGGGSQVQLVQSGAEVKKPGASVKVSCKASGYTFTSYDINWVRQAPGQGLEWMGVISPSGGGTSYAQKFQGRVTMTRDTSTSTVYMELSSLRSEDTAVYYCARYYGGNPEGWYFDLWGRGTLVTVSSGGGGSGGGGSGGGGSDIQMTQSPSSLSASVGDRVTITCRASQSIGNWLAWYQQKPGKAPKLLIYDASDLETGVPSRFSGSGSGTDFTLTISSLQPEDFATYYCQQSYTTPWTFGQGTKVEIKTTTPAPRPPTPAPTIASQPLSLRPEACRPAAGGAVHTRGLDFACDIYIWAPLAGTCGVLLLSLVITLYCRRDQRLPPDAHKPPGGGSFRTPIQEEQADAHSTLAKIRVKFSRSADAPAYQQGQNQLYNELNLGRREEYDVLDKRRGRDPEMGGKPRRKNPQEGLYNELQKDKMAEAYSEIGMKGERRRGKGHDGLYQGLSTATKDTYDALHMQALPPRGSGEGRGSLLTCGDVEENPGPMALPVTALLLPLALLLHAARPNWVNVISDLKKIEDLIQSMHIDATLYTESDVHPSCKVTAMKCFLLELQVISLESGDASIHDTVENLIILANNSLSSNGNVTESGCKECEELEEKNIKEFLQSFVHIVQMFINTSTTTPAPRPPTPAPTIASQPLSLRPEACRPAAGGAVHTRGLDFACDIYIWAPLAGTCGVLLLSLVITLYC

SEQ ID NO: 450 - protein, 741 aa, synthetic construct
MALPVTALLLPLALLLHAARPDYKDDDDKGGGGSGGGGSEVQLLESGGGLVQPGGSLRLSCAASGFVFDDYAIHWVRQAPGKGLEWVAAISYDGSNKYYADSVKGRFTISRDNSKNTLYLQMNSLRAEDTAVYYCARAPQYYGSGTDPLEVRYYYYGMDVWGQGTTVTVSSGGGGSGGGGSGGGGSDIVMTQSPLSLPVTPGEPASISCRSSQSLLHSNGYNYLDWYLQKPGQSPQLLIYEVSNRASGVPDRFSGSGSGTDFTLKISRVEAEDVGVYYCMKGLQTPLTFGPGTKVDIKTTTPAPRPPTPAPTIASQPLSLRPEACRPAAGGAVHTRGLDFACDIYIWAPLAGTCGVLLLSLVITLYCRRDQRLPPDAHKPPGGGSFRTPIQEEQADAHSTLAKIRVKFSRSADAPAYQQGQNQLYNELNLGRREEYDVLDKRRGRDPEMGGKPRRKNPQEGLYNELQKDKMAEAYSEIGMKGERRRGKGHDGLYQGLSTATKDTYDALHMQALPPRGSGEGRGSLLTCGDVEENPGPMALPVTALLLPLALLLHAARPNWVNVISDLKKIEDLIQSMHIDATLYTESDVHPSCKVTAMKCFLLELQVISLESGDASIHDTVENLIILANNSLSSNGNVTESGCKECEELEEKNIKEFLQSFVHIVQMFINTSTTTPAPRPPTPAPTIASQPLSLRPEACRPAAGGAVHTRGLDFACDIYIWAPLAGTCGVLLLSLVITLYC

SEQ ID NO: 451 - protein, 726 aa, synthetic construct
MALPVTALLLPLALLLHAARPDYKDDDDKGGGGSGGGGSQVQLVQSGAEVKKPGSSVKVSCKASGGTFRNYAISWVRQAPGQGLEWMGGIIPIFGTANYAQKFQGRVTITADESTSTAYMELSSLRSEDTAVYYCARDHSAGTHHDAFDIWGQGTMVTVSSGGGGSGGGGSGGGGSDIQMTQSPSSLSASVGDRVTITCRASQGISNYLAWYQQKPGKAPKLLIYAASSLQSGVPSRFSGSGSGTDFTLTISSLQPEDFATYYCQQSHSTPLTFGQGTKVEIKTTTPAPRPPTPAPTIASQPLSLRPEACRPAAGGAVHTRGLDFACDIYIWAPLAGTCGVLLLSLVITLYCRRDQRLPPDAHKPPGGGSFRTPIQEEQADAHSTLAKIRVKFSRSADAPAYQQGQNQLYNELNLGRREEYDVLDKRRGRDPEMGGKPRRKNPQEGLYNELQKDKMAEAYSEIGMKGERRRGKGHDGLYQGLSTATKDTYDALHMQALPPRGSGEGRGSLLTCGDVEENPGPMALPVTALLLPLALLLHAARPNWVNVISDLKKIEDLIQSMHIDATLYTESDVHPSCKVTAMKCFLLELQVISLESGDASIHDTVENLIILANNSLSSNGNVTESGCKECEELEEKNIKEFLQSFVHIVQMFINTSTTTPAPRPPTPAPTIASQPLSLRPEACRPAAGGAVHTRGLDFACDIYIWAPLAGTCGVLLLSLVITLYC

SEQ ID NO: 452 - protein, 721 aa, synthetic construct
MALPVTALLLPLALLLHAARPDYKDDDDKGGGGSGGGGSQVQLVQSGAEVKKPGASVKVSCKASGYTFTSYYIHWVRQAPGQGLEWMGWMNPNSGNAGYAQKFQGRVTMTRDTSTSTVYMELSSLRSEDTAVYYCAREYWGSFDYWGQGTLVTVSSGGGGSGGGGSGGGGSDIQMTQSPSSLSASVGDRVTITCRASQGISNNLNWYQQKPGKAPKLLIYDASNLETGVPSRFSGSGSGTDFTLTISSLQPEDFATYYCQQSYSTPYTFGQGTKVEIKTTTPAPRPPTPAPTIASQPLSLRPEACRPAAGGAVHTRGLDFACDIYIWAPLAGTCGVLLLSLVITLYCRRDQRLPPDAHKPPGGGSFRTPIQEEQADAHSTLAKIRVKFSRSADAPAYQQGQNQLYNELNLGRREEYDVLDKRRGRDPEMGGKPRRKNPQEGLYNELQKDKMAEAYSEIGMKGERRRGKGHDGLYQGLSTATKDTYDALHMQALPPRGSGEGRGSLLTCGDVEENPGPMALPVTALLLPLALLLHAARPNWVNVISDLKKIEDLIQSMHIDATLYTESDVHPSCKVTAMKCFLLELQVISLESGDASIHDTVENLIILANNSLSSNGNVTESGCKECEELEEKNIKEFLQSFVHIVQMFINTSTTTPAPRPPTPAPTIASQPLSLRPEACRPAAGGAVHTRGLDFACDIYIWAPLAGTCGVLLLSLVITLYC

SEQ ID NO: 453 - protein, 722 aa, synthetic construct
MALPVTALLLPLALLLHAARPDYKDDDDKGGGGSGGGGSQVQLVQSGAEVKKPGASVKVSCKASGYTFTGYYMHWVRQAPGQGLEWMGMIDPSDGSTIYAQKFQGRVTMTRDTSTSTVYMELSSLRSEDTAVYYCARERPLYASDLWGQGTLVTVSSGGGGSGGGGSGGGGSDIQMTQSPSSLSASVGDRVTITCRASQDIGNDLGWYQQKPGKAPKLLIYAASSLQSGVPSRFSGSGSGTDFTLTISSLQPEDFATYYCLQDYDYPLTFGQGTKVEIKTTTPAPRPPTPAPTIASQPLSLRPEACRPAAGGAVHTRGLDFACDIYIWAPLAGTCGVLLLSLVITLYCRRDQRLPPDAHKPPGGGSFRTPIQEEQADAHSTLAKIRVKFSRSADAPAYQQGQNQLYNELNLGRREEYDVLDKRRGRDPEMGGKPRRKNPQEGLYNELQKDKMAEAYSEIGMKGERRRGKGHDGLYQGLSTATKDTYDALHMQALPPRGSGEGRGSLLTCGDVEENPGPMALPVTALLLPLALLLHAARPNWVNVISDLKKIEDLIQSMHIDATLYTESDVHPSCKVTAMKCFLLELQVISLESGDASIHDTVENLIILANNSLSSNGNVTESGCKECEELEEKNIKEFLQSFVHIVQMFINTSTTTPAPRPPTPAPTIASQPLSLRPEACRPAAGGAVHTRGLDFACDIYIWAPLAGTCGVLLLSLVITLYC

SEQ ID NO: 454 - protein, 723 aa, synthetic construct
MALPVTALLLPLALLLHAARPDYKDDDDKGGGGSGGGGSQVQLVQSGAEVKKPGSSVKVSCKASGYTFTNYYMHWVRQAPGQGLEWMGWMNPDSGNTGYAQKFQGRVTITADESTSTAYMELSSLRSEDTAVYYCARSSSSWPDFDLWGRGTLVTVSSGGGGSGGGGSGGGGSDIQMTQSPSSLSASVGDRVTITCRASQSISSYLNWYQQKPGKAPKLLIYDASNLETGVPSRFSGSGSGTDFTLTISSLQPEDFATYYCQQSYNTPYSFGQGTKVEIKTTTPAPRPPTPAPTIASQPLSLRPEACRPAAGGAVHTRGLDFACDIYIWAPLAGTCGVLLLSLVITLYCRRDQRLPPDAHKPPGGGSFRTPIQEEQADAHSTLAKIRVKFSRSADAPAYQQGQNQLYNELNLGRREEYDVLDKRRGRDPEMGGKPRRKNPQEGLYNELQKDKMAEAYSEIGMKGERRRGKGHDGLYQGLSTATKDTYDALHMQALPPRGSGEGRGSLLTCGDVEENPGPMALPVTALLLPLALLLHAARPNWVNVISDLKKIEDLIQSMHIDATLYTESDVHPSCKVTAMKCFLLELQVISLESGDASIHDTVENLIILANNSLSSNGNVTESGCKECEELEEKNIKEFLQSFVHIVQMFINTSTTTPAPRPPTPAPTIASQPLSLRPEACRPAAGGAVHTRGLDFACDIYIWAPLAGTCGVLLLSLVITLYC

SEQ ID NO: 455 - protein, 724 aa, synthetic construct
MALPVTALLLPLALLLHAARPDYKDDDDKGGGGSGGGGSQVQLVQSGAEVKKPGASVKVSCKASGYTFTSYSMHWVRQAPGQGLEWVGIINPSSGSASYAQKFQGRVTMTRDTSTSTVYMELSSLRSEDTAVYYCARERGAYSSTFDYWGQGTLVTVSSGGGGSGGGGSGGGGSDIQMTQSPSSLSASVGDRVTITCRTSQSISSYLNWYQQKPGKAPKLLIYDASNLETGVPSRFSGSGSGTDFTLTISSLQPEDFATYYCLQDYSYPLTFGQGTKVEIKTTTPAPRPPTPAPTIASQPLSLRPEACRPAAGGAVHTRGLDFACDIYIWAPLAGTCGVLLLSLVITLYCRRDQRLPPDAHKPPGGGSFRTPIQEEQADAHSTLAKIRVKFSRSADAPAYQQGQNQLYNELNLGRREEYDVLDKRRGRDPEMGGKPRRKNPQEGLYNELQKDKMAEAYSEIGMKGERRRGKGHDGLYQGLSTATKDTYDALHMQALPPRGSGEGRGSLLTCGDVEENPGPMALPVTALLLPLALLLHAARPNWVNVISDLKKIEDLIQSMHIDATLYTESDVHPSCKVTAMKCFLLELQVISLESGDASIHDTVENLIILANNSLSSNGNVTESGCKECEELEEKNIKEFLQSFVHIVQMFINTSTTTPAPRPPTPAPTIASQPLSLRPEACRPAAGGAVHTRGLDFACDIYIWAPLAGTCGVLLLSLVITLYC

SEQ ID NO: 456 - protein, 724 aa, synthetic construct
MALPVTALLLPLALLLHAARPDYKDDDDKGGGGSGGGGSQVQLVQSGAEVKKPGASVKVSCKASGYTFTDYYMHWVRQAPGQGLEWMGVINPSDGTAHYAQRLQGRVTMTRDTSTSTVYMELSSLRSEDTAVYYCARDSGSYYADFDYWGQGTLVTVSSGGGGSGGGGSGGGGSDIQMTQSPSSLSASVGDRVTITCQASQDISNYLNWYQQKPGKAPKLLIYDASSLQSGVPSRFSGSGSGTDFTLTISSLQPEDFATYYCQQSYSTPPAFGQGTKVEIKTTTPAPRPPTPAPTIASQPLSLRPEACRPAAGGAVHTRGLDFACDIYIWAPLAGTCGVLLLSLVITLYCRRDQRLPPDAHKPPGGGSFRTPIQEEQADAHSTLAKIRVKFSRSADAPAYQQGQNQLYNELNLGRREEYDVLDKRRGRDPEMGGKPRRKNPQEGLYNELQKDKMAEAYSEIGMKGERRRGKGHDGLYQGLSTATKDTYDALHMQALPPRGSGEGRGSLLTCGDVEENPGPMALPVTALLLPLALLLHAARPNWVNVISDLKKIEDLIQSMHIDATLYTESDVHPSCKVTAMKCFLLELQVISLESGDASIHDTVENLIILANNSLSSNGNVTESGCKECEELEEKNIKEFLQSFVHIVQMFINTSTTTPAPRPPTPAPTIASQPLSLRPEACRPAAGGAVHTRGLDFACDIYIWAPLAGTCGVLLLSLVITLYC

SEQ ID NO: 457 - protein, 989 aa, synthetic construct
MALPVTALLLPLALLLHAARPDYKDDDDKGGGGSGGGGSQVQLVQSGAEVKKPGASVKVSCKASGYSFTSYYMHWVRQAPGQGLEWMGIINPSGGTTSYAQKFQGRVTMTRDTSTSTVYMELSSLRSEDTAVYYCARDNSPYSSSWWDYFDYWGQGTLVTVSSGGGGSGGGGSGGGGSDIQMTQSPSSLSASVGDRVTITCRASQDIRHYLAWYQQKPGKAPKLLIYDASSLQSGVPSRFSGSGSGTDFTLTISSLQPEDFATYYCQQTYDAPITFGQGTRLEIKGGGGSGGGGSGGGGSQVQLVQSGAEVKKPGASVKVSCKASGYSFTSYYMHWVRQAPGQGLEWMGIINPSGGTTSYAQKFQGRVTMTRDTSTSTVYMELSSLRSEDTAVYYCARDNSPYSSSWWDYFDYWGQGTLVTVSSGGGGSGGGGSGGGGSDIQMTQSPSSLSASVGDRVTITCRASQDIRHYLAWYQQKPGKAPKLLIYDASSLQSGVPSRFSGSGSGTDFTLTISSLQPEDFATYYCQQTYDAPITFGQGTRLEIKTTTPAPRPPTPAPTIASQPLSLRPEACRPAAGGAVHTRGLDFACDIYIWAPLAGTCGVLLLSLVITLYCRRDQRLPPDAHKPPGGGSFRTPIQEEQADAHSTLAKIRVKFSRSADAPAYQQGQNQLYNELNLGRREEYDVLDKRRGRDPEMGGKPRRKNPQEGLYNELQKDKMAEAYSEIGMKGERRRGKGHDGLYQGLSTATKDTYDALHMQALPPRGSGEGRGSLLTCGDVEENPGPMALPVTALLLPLALLLHAARPNWVNVISDLKKIEDLIQSMHIDATLYTESDVHPSCKVTAMKCFLLELQVISLESGDASIHDTVENLIILANNSLSSNGNVTESGCKECEELEEKNIKEFLQSFVHIVQMFINTSTTTPAPRPPTPAPTIASQPLSLRPEACRPAAGGAVHTRGLDFACDIYIWAPLAGTCGVLLLSLVITLYC

SEQ ID NO: 458 - protein, 989 aa, synthetic construct
MALPVTALLLPLALLLHAARPDYKDDDDKGGGGSGGGGSQVQLVQSGAEVKKPGSSVKVSCKASGYTFTSYGISWVRQAPGQGLEWMGGIIPIFGTTNYAQKFQGRVTITADESTSTAYMELSSLRSEDTAVYYCARDHSGDGYFDLWGRGTLVTVSSGGGGSGGGGSGGGGSDIVMTQSPLSLPVTPGEPASISCRSSQSLLHSNGYNYLDWYLQKPGQSPQLLIYDASSLQSGVPDRFSGSGSGTDFTLKISRVEAEDVGVYYCMQGTHWPPTFGQGTKVEIKGGGGSGGGGSGGGGSQVQLVQSGAEVKKPGSSVKVSCKASGYTFTSYGISWVRQAPGQGLEWMGGIIPIFGTTNYAQKFQGRVTITADESTSTAYMELSSLRSEDTAVYYCARDHSGDGYFDLWGRGTLVTVSSGGGGSGGGGSGGGGSDIVMTQSPLSLPVTPGEPASISCRSSQSLLHSNGYNYLDWYLQKPGQSPQLLIYDASSLQSGVPDRFSGSGSGTDFTLKISRVEAEDVGVYYCMQGTHWPPTFGQGTKVEIKTTTPAPRPPTPAPTIASQPLSLRPEACRPAAGGAVHTRGLDFACDIYIWAPLAGTCGVLLLSLVITLYCRRDQRLPPDAHKPPGGGSFRTPIQEEQADAHSTLAKIRVKFSRSADAPAYQQGQNQLYNELNLGRREEYDVLDKRRGRDPEMGGKPRRKNPQEGLYNELQKDKMAEAYSEIGMKGERRRGKGHDGLYQGLSTATKDTYDALHMQALPPRGSGEGRGSLLTCGDVEENPGPMALPVTALLLPLALLLHAARPNWVNVISDLKKIEDLIQSMHIDATLYTESDVHPSCKVTAMKCFLLELQVISLESGDASIHDTVENLIILANNSLSSNGNVTESGCKECEELEEKNIKEFLQSFVHIVQMFINTSTTTPAPRPPTPAPTIASQPLSLRPEACRPAAGGAVHTRGLDFACDIYIWAPLAGTCGVLLLSLVITLYC

SEQ ID NO: 459 - protein, 977 aa, synthetic construct
MALPVTALLLPLALLLHAARPDYKDDDDKGGGGSGGGGSQVQLVQSGAEVKKPGASVKVSCKASGYTFTENEMHWVRQAPGQGLEWMGWINPNSGGTNYAQKFQGRVTMTRDTSTSTVYMELSSLRSEDTAVYYCAGSWGGYYFDYWGQGTLVTVSSGGGGSGGGGSGGGGSDIQMTQSPSSLSASVGDRVTITCRASQSVSRYLNWYQQKPGKAPKLLIYDASNLETGVPSRFSGSGSGTDFTLTISSLQPEDFATYYCQQADSFPVTFGQGTKLEIKGGGGSGGGGSGGGGSQVQLVQSGAEVKKPGASVKVSCKASGYTFTENEMHWVRQAPGQGLEWMGWINPNSGGTNYAQKFQGRVTMTRDTSTSTVYMELSSLRSEDTAVYYCAGSWGGYYFDYWGQGTLVTVSSGGGGSGGGGSGGGGSDIQMTQSPSSLSASVGDRVTITCRASQSVSRYLNWYQQKPGKAPKLLIYDASNLETGVPSRFSGSGSGTDFTLTISSLQPEDFATYYCQQADSFPVTFGQGTKLEIKTTTPAPRPPTPAPTIASQPLSLRPEACRPAAGGAVHTRGLDFACDIYIWAPLAGTCGVLLLSLVITLYCRRDQRLPPDAHKPPGGGSFRTPIQEEQADAHSTLAKIRVKFSRSADAPAYQQGQNQLYNELNLGRREEYDVLDKRRGRDPEMGGKPRRKNPQEGLYNELQKDKMAEAYSEIGMKGERRRGKGHDGLYQGLSTATKDTYDALHMQALPPRGSGEGRGSLLTCGDVEENPGPMALPVTALLLPLALLLHAARPNWVNVISDLKKIEDLIQSMHIDATLYTESDVHPSCKVTAMKCFLLELQVISLESGDASIHDTVENLIILANNSLSSNGNVTESGCKECEELEEKNIKEFLQSFVHIVQMFINTSTTTPAPRPPTPAPTIASQPLSLRPEACRPAAGGAVHTRGLDFACDIYIWAPLAGTCGVLLLSLVITLYC

SEQ ID NO: 460 - protein, 992 aa, synthetic construct
MALPVTALLLPLALLLHAARPDYKDDDDKGGGGSGGGGSQVQLVQSGAEVKKPGASVKVSCKASGYSFTSYYMHWVRQAPGQGLEWMGIINPSGGTTSYAQKFQGRVTMTRDTSTSTVYMELSSLRSEDTAVYYCARDNSPYSSSWWDYFDYWGQGTLVTVSSGGGGSGGGGSGGGGSDIQMTQSPSSLSASVGDRVTITCRASQDIRHYLAWYQQKPGKAPKLLIYDASSLQSGVPSRFSGSGSGTDFTLTISSLQPEDFATYYCQQTYDAPITFGQGTRLEIKGGGGSGGGGSGGGGSQVQLVQSGAEVKKPGSSVKVSCKASGGTFSSYAISWVRQAPGQGLEWMGGITPMFGTTDYAQKFQGRVTITADESTSTAYMELSSLRSEDTAVYYCARDERDGYATVAFDIWGQGTMVTVSSGGGGSGGGGSGGGGSDIVMTQSPLSLPVTPGEPASISCRSSQSLLHSNGYNYLDWYLQKPGQSPQLLIYDASNLETGVPDRFSGSGSGTDFTLKISRVEAEDVGVYYCMQGTHWPPTFGQGTKVEIKTTTPAPRPPTPAPTIASQPLSLRPEACRPAAGGAVHTRGLDFACDIYIWAPLAGTCGVLLLSLVITLYCRRDQRLPPDAHKPPGGGSFRTPIQEEQADAHSTLAKIRVKFSRSADAPAYQQGQNQLYNELNLGRREEYDVLDKRRGRDPEMGGKPRRKNPQEGLYNELQKDKMAEAYSEIGMKGERRRGKGHDGLYQGLSTATKDTYDALHMQALPPRGSGEGRGSLLTCGDVEENPGPMALPVTALLLPLALLLHAARPNWVNVISDLKKIEDLIQSMHIDATLYTESDVHPSCKVTAMKCFLLELQVISLESGDASIHDTVENLIILANNSLSSNGNVTESGCKECEELEEKNIKEFLQSFVHIVQMFINTSTTTPAPRPPTPAPTIASQPLSLRPEACRPAAGGAVHTRGLDFACDIYIWAPLAGTCGVLLLSLVITLYC

SEQ ID NO: 461 - protein, 987 aa, synthetic construct
MALPVTALLLPLALLLHAARPDYKDDDDKGGGGSGGGGSQVQLVQSGAEVKKPGASVKVSCKASGYSFTSYYMHWVRQAPGQGLEWMGIINPSGGTTSYAQKFQGRVTMTRDTSTSTVYMELSSLRSEDTAVYYCARDNSPYSSSWWDYFDYWGQGTLVTVSSGGGGSGGGGSGGGGSDIQMTQSPSSLSASVGDRVTITCRASQDIRHYLAWYQQKPGKAPKLLIYDASSLQSGVPSRFSGSGSGTDFTLTISSLQPEDFATYYCQQTYDAPITFGQGTRLEIKGGGGSGGGGSGGGGSQVQLVQSGAEVKKPGASVKVSCKASGYTFTSYYMHWVRQAPGQGLEWMGIINPSDGGTSYADKFQGRVTMTRDTSTSTVYMELSSLRSEDTAVYYCARALAPLGWGDGMDVWGQGTTVTVSSGGGGSGGGGSGGGGSDIQMTQSPSSLSASVGDRVTITCQASQDISNYLNWYQQKPGKAPKLLIYDASNLETGVPSRFSGSGSGTDFTLTISSLQPEDFATYYCQQSYDGPITFGQGTRLEIKTTTPAPRPPTPAPTIASQPLSLRPEACRPAAGGAVHTRGLDFACDIYIWAPLAGTCGVLLLSLVITLYCRRDQRLPPDAHKPPGGGSFRTPIQEEQADAHSTLAKIRVKFSRSADAPAYQQGQNQLYNELNLGRREEYDVLDKRRGRDPEMGGKPRRKNPQEGLYNELQKDKMAEAYSEIGMKGERRRGKGHDGLYQGLSTATKDTYDALHMQALPPRGSGEGRGSLLTCGDVEENPGPMALPVTALLLPLALLLHAARPNWVNVISDLKKIEDLIQSMHIDATLYTESDVHPSCKVTAMKCFLLELQVISLESGDASIHDTVENLIILANNSLSSNGNVTESGCKECEELEEKNIKEFLQSFVHIVQMFINTSTTTPAPRPPTPAPTIASQPLSLRPEACRPAAGGAVHTRGLDFACDIYIWAPLAGTCGVLLLSLVITLYC

SEQ ID NO: 462 - protein, 992 aa, synthetic construct
MALPVTALLLPLALLLHAARPDYKDDDDKGGGGSGGGGSQVQLVQSGAEVKKPGSSVKVSCKASGYTFTSYGISWVRQAPGQGLEWMGGIIPIFGTTNYAQKFQGRVTITADESTSTAYMELSSLRSEDTAVYYCARDHSGDGYFDLWGRGTLVTVSSGGGGSGGGGSGGGGSDIVMTQSPLSLPVTPGEPASISCRSSQSLLHSNGYNYLDWYLQKPGQSPQLLIYDASSLQSGVPDRFSGSGSGTDFTLKISRVEAEDVGVYYCMQGTHWPPTFGQGTKVEIKGGGGSGGGGSGGGGSQVQLVQSGAEVKKPGSSVKVSCKASGGTFSSYAISWVRQAPGQGLEWMGGITPMFGTTDYAQKFQGRVTITADESTSTAYMELSSLRSEDTAVYYCARDERDGYATVAFDIWGQGTMVTVSSGGGGSGGGGSGGGGSDIVMTQSPLSLPVTPGEPASISCRSSQSLLHSNGYNYLDWYLQKPGQSPQLLIYDASNLETGVPDRFSGSGSGTDFTLKISRVEAEDVGVYYCMQGTHWPPTFGQGTKVEIKTTTPAPRPPTPAPTIASQPLSLRPEACRPAAGGAVHTRGLDFACDIYIWAPLAGTCGVLLLSLVITLYCRRDQRLPPDAHKPPGGGSFRTPIQEEQADAHSTLAKIRVKFSRSADAPAYQQGQNQLYNELNLGRREEYDVLDKRRGRDPEMGGKPRRKNPQEGLYNELQKDKMAEAYSEIGMKGERRRGKGHDGLYQGLSTATKDTYDALHMQALPPRGSGEGRGSLLTCGDVEENPGPMALPVTALLLPLALLLHAARPNWVNVISDLKKIEDLIQSMHIDATLYTESDVHPSCKVTAMKCFLLELQVISLESGDASIHDTVENLIILANNSLSSNGNVTESGCKECEELEEKNIKEFLQSFVHIVQMFINTSTTTPAPRPPTPAPTIASQPLSLRPEACRPAAGGAVHTRGLDFACDIYIWAPLAGTCGVLLLSLVITLYC

SEQ ID NO: 463 - protein, 987 aa, synthetic construct
MALPVTALLLPLALLLHAARPDYKDDDDKGGGGSGGGGSQVQLVQSGAEVKKPGSSVKVSCKASGYTFTSYGISWVRQAPGQGLEWMGGIIPIFGTTNYAQKFQGRVTITADESTSTAYMELSSLRSEDTAVYYCARDHSGDGYFDLWGRGTLVTVSSGGGGSGGGGSGGGGSDIVMTQSPLSLPVTPGEPASISCRSSQSLLHSNGYNYLDWYLQKPGQSPQLLIYDASSLQSGVPDRFSGSGSGTDFTLKISRVEAEDVGVYYCMQGTHWPPTFGQGTKVEIKGGGGSGGGGSGGGGSQVQLVQSGAEVKKPGASVKVSCKASGYTFTSYYMHWVRQAPGQGLEWMGIINPSDGGTSYADKFQGRVTMTRDTSTSTVYMELSSLRSEDTAVYYCARALAPLGWGDGMDVWGQGTTVTVSSGGGGSGGGGSGGGGSDIQMTQSPSSLSASVGDRVTITCQASQDISNYLNWYQQKPGKAPKLLIYDASNLETGVPSRFSGSGSGTDFTLTISSLQPEDFATYYCQQSYDGPITFGQGTRLEIKTTTPAPRPPTPAPTIASQPLSLRPEACRPAAGGAVHTRGLDFACDIYIWAPLAGTCGVLLLSLVITLYCRRDQRLPPDAHKPPGGGSFRTPIQEEQADAHSTLAKIRVKFSRSADAPAYQQGQNQLYNELNLGRREEYDVLDKRRGRDPEMGGKPRRKNPQEGLYNELQKDKMAEAYSEIGMKGERRRGKGHDGLYQGLSTATKDTYDALHMQALPPRGSGEGRGSLLTCGDVEENPGPMALPVTALLLPLALLLHAARPNWVNVISDLKKIEDLIQSMHIDATLYTESDVHPSCKVTAMKCFLLELQVISLESGDASIHDTVENLIILANNSLSSNGNVTESGCKECEELEEKNIKEFLQSFVHIVQMFINTSTTTPAPRPPTPAPTIASQPLSLRPEACRPAAGGAVHTRGLDFACDIYIWAPLAGTCGVLLLSLVITLYC

SEQ ID NO: 464 - protein, 986 aa, synthetic construct
MALPVTALLLPLALLLHAARPDYKDDDDKGGGGSGGGGSQVQLVQSGAEVKKPGASVKVSCKASGYTFTENEMHWVRQAPGQGLEWMGWINPNSGGTNYAQKFQGRVTMTRDTSTSTVYMELSSLRSEDTAVYYCAGSWGGYYFDYWGQGTLVTVSSGGGGSGGGGSGGGGSDIQMTQSPSSLSASVGDRVTITCRASQSVSRYLNWYQQKPGKAPKLLIYDASNLETGVPSRFSGSGSGTDFTLTISSLQPEDFATYYCQQADSFPVTFGQGTKLEIKGGGGSGGGGSGGGGSQVQLVQSGAEVKKPGSSVKVSCKASGGTFSSYAISWVRQAPGQGLEWMGGITPMFGTTDYAQKFQGRVTITADESTSTAYMELSSLRSEDTAVYYCARDERDGYATVAFDIWGQGTMVTVSSGGGGSGGGGSGGGGSDIVMTQSPLSLPVTPGEPASISCRSSQSLLHSNGYNYLDWYLQKPGQSPQLLIYDASNLETGVPDRFSGSGSGTDFTLKISRVEAEDVGVYYCMQGTHWPPTFGQGTKVEIKTTTPAPRPPTPAPTIASQPLSLRPEACRPAAGGAVHTRGLDFACDIYIWAPLAGTCGVLLLSLVITLYCRRDQRLPPDAHKPPGGGSFRTPIQEEQADAHSTLAKIRVKFSRSADAPAYQQGQNQLYNELNLGRREEYDVLDKRRGRDPEMGGKPRRKNPQEGLYNELQKDKMAEAYSEIGMKGERRRGKGHDGLYQGLSTATKDTYDALHMQALPPRGSGEGRGSLLTCGDVEENPGPMALPVTALLLPLALLLHAARPNWVNVISDLKKIEDLIQSMHIDATLYTESDVHPSCKVTAMKCFLLELQVISLESGDASIHDTVENLIILANNSLSSNGNVTESGCKECEELEEKNIKEFLQSFVHIVQMFINTSTTTPAPRPPTPAPTIASQPLSLRPEACRPAAGGAVHTRGLDFACDIYIWAPLAGTCGVLLLSLVITLYC

SEQ ID NO: 465 - protein, 981 aa, synthetic construct
MALPVTALLLPLALLLHAARPDYKDDDDKGGGGSGGGGSQVQLVQSGAEVKKPGASVKVSCKASGYTFTENEMHWVRQAPGQGLEWMGWINPNSGGTNYAQKFQGRVTMTRDTSTSTVYMELSSLRSEDTAVYYCAGSWGGYYFDYWGQGTLVTVSSGGGGSGGGGSGGGGSDIQMTQSPSSLSASVGDRVTITCRASQSVSRYLNWYQQKPGKAPKLLIYDASNLETGVPSRFSGSGSGTDFTLTISSLQPEDFATYYCQQADSFPVTFGQGTKLEIKGGGGSGGGGSGGGGSQVQLVQSGAEVKKPGASVKVSCKASGYTFTSYYMHWVRQAPGQGLEWMGIINPSDGGTSYADKFQGRVTMTRDTSTSTVYMELSSLRSEDTAVYYCARALAPLGWGDGMDVWGQGTTVTVSSGGGGSGGGGSGGGGSDIQMTQSPSSLSASVGDRVTITCQASQDISNYLNWYQQKPGKAPKLLIYDASNLETGVPSRFSGSGSGTDFTLTISSLQPEDFATYYCQQSYDGPITFGQGTRLEIKTTTPAPRPPTPAPTIASQPLSLRPEACRPAAGGAVHTRGLDFACDIYIWAPLAGTCGVLLLSLVITLYCRRDQRLPPDAHKPPGGGSFRTPIQEEQADAHSTLAKIRVKFSRSADAPAYQQGQNQLYNELNLGRREEYDVLDKRRGRDPEMGGKPRRKNPQEGLYNELQKDKMAEAYSEIGMKGERRRGKGHDGLYQGLSTATKDTYDALHMQALPPRGSGEGRGSLLTCGDVEENPGPMALPVTALLLPLALLLHAARPNWVNVISDLKKIEDLIQSMHIDATLYTESDVHPSCKVTAMKCFLLELQVISLESGDASIHDTVENLIILANNSLSSNGNVTESGCKECEELEEKNIKEFLQSFVHIVQMFINTSTTTPAPRPPTPAPTIASQPLSLRPEACRPAAGGAVHTRGLDFACDIYIWAPLAGTCGVLLLSLVITLYC

SEQ ID NO: 466 - DNA, 1472 bp, synthetic construct
  source 1..1472: mol_type = other DNA
atggccttaccagtgaccgccttgctcctgccgctggccttgctgctccacgccgccaggccggatattcagatgacccagagcccgagcagcctgagcgcgagcgtgggcgatcgcgtgaccattacctgccgcgcgagccaggatattagcaaatatctgaactggtatcagcagaaaccgggcggcaccgtgaaactgctgatttatcataccagccgcctgcatagcggcgtgccgagccgctttagcggcagcggcagcggcaccgattttaccctgaccattagcagcctgcagccggaagatattgcgacctatttttgccagcagggcaacaccctgccgtatacctttggcggcggcaccaaactggaaattaccggtggcggtggctcgggcggtggtgggtcgggtggcggcggatctcaggtgcagctgcaggaaagcggcccgggcctggtgaaaccgagccagaccctgagcctgacctgcaccgtgagcggcgtgagcctgccggattatggcgtgagctggattcgccagccgccgggcaaaggcctggaatggattggcgtgatttggggcagcgaaaccacctattataacagcgcgctgaaaagccgcctgaccattagcaaagataacagcaaaaaccaggtgagcctgaaactgagcagcgtgaccgcggcggataccgcggtgtattattgcgcgaaacattattattatggcggcagctatgcgatggattattggggccagggcaccagcgtgaccgtgagcagcaccacgacgccagcgccgcgaccaccaacaccggcgcccaccatcgcgtcgcagcccctgtccctgcgcccagaggcgtgccggccagcggcggggggcgcagtgcacacgagggggctggacttcgcctgtgatatctacatctgggcgcccttggccgggacttgtggggtccttctcctgtcactggttatcaccctttactgcgcttttccgtcgttaagcgggggagaaaaaagctgctgtacattttcaaacagccgtttatgaggccggtccaaacgactcaggaagaagacggctgctcctgccgctttcctgaggaggaggagggcgggtgcgaactgagagtgaagttcagcaggagcgcagacgcccccgcgtaccagcagggccagaaccagctctataacgagctcaatctaggacgaagagaggagtacgatgttttggacaagagacgtggccgggaccctgagatggggggaaagccgagaaggaagaaccctcaggaaggcctgtacaatgaactgcagaaagataagatggcggaggcctacagtgagattgggatgaaaggcgagcgccggaggggcaaggggcacgatggcctttaccagggtctcagtacagccaccaaggacacctacgacgcccttcacatgcaggccctgccccctcgc

SEQ ID NO: 467 - protein, 9 aa, synthetic construct
GALFLGFLG

SEQ ID NO: 468 - protein, 9 aa, synthetic construct
AGLFLGFLG

SEQ ID NO: 469 - protein, 9 aa, synthetic construct
GLAFLGFLG

SEQ ID NO: 470 - protein, 9 aa, synthetic construct
AGFGLLGLF

SEQ ID NO: 471 - protein, 9 aa, synthetic construct
AGFGLLLGF

SEQ ID NO: 472 - protein, 9 aa, synthetic construct
GLRILLLKV

SEQ ID NO: 473-474 - skipped (2 entries)

SEQ ID NO: 475 - DNA, 1797 bp, synthetic construct
  source 1..1797: mol_type = other DNA
atggccttaccagtgaccgccttgctcctgccgctggccttgctgctccacgccgccaggccgttattcaaccaagaagttcaaattcccttgaccgaaagttactgtggcccatgtcctaaaaactggatatgttacaaaaataactgctaccaattttttgatgagagtaaaaactggtatgagagccaggcttcttgtatgtctcaaaatgccagccttctgaaagtatacagcaaagaggaccaggatttacttaaactggtgaagtcatatcattggatgggactagtacacattccaacaaatggatcttggcagtgggaagatggctccattctctcacccaacctactaacaataattgaaatgcagaagggagactgtgcactctatgcctcgagctttaaaggctatatagaaaactgttcaactccaaatacgtacatctgcatgcaaaggactgtgaccacgacgccagcgccgcgaccaccaacaccggcgcccaccatcgcgtcgcagcccctgtccctgcgcccagaggcgtgccggccagcggcggggggcgcagtgcacacgagggggctggacttcgcctgtgatatctacatctgggcgcccttggccgggacttgtggggtccttctcctgtcactggttatcaccctttactgccggagggaccagaggctgccccccgatgcccacaagccccctgggggaggcagtttccggacccccatccaagaggagcaggccgacgcccactccaccctggccaagatcagagtgaagttcagcaggagcgcagacgcccccgcgtaccagcagggccagaaccagctctataacgagctcaatctaggacgaagagaggagtacgatgttttggacaagagacgtggccgggaccctgagatggggggaaagccgagaaggaagaaccctcaggaaggcctgtacaatgaactgcagaaagataagatggcggaggcctacagtgagattgggatgaaaggcgagcgccggaggggcaaggggcacgatggcctttaccagggtctcagtacagccaccaaggacacctacgacgcccttcacatgcaggccctgccccctcgcggctctggcgagggaaggggttccctgcttacttgcggcgacgtcgaagagaatcccggtccgatggccctcccagtaactgccctccttttgcccctcgcactccttcttcatgccgctcgccccaactgggtcaacgtgattagcgatttgaagaaaatcgaggaccttatacagtctatgcatattgacgctacactgtatactgagagtgatgtacacccgtcctgtaaggtaacggccatgaaatgctttcttctggagctccaggtcatcagcttggagtctggggacgcaagcatccacgatacggttgaaaacctcatcatccttgcgaacaactctctctcatctaatggaaacgttacagagagtgggtgtaaggagtgcgaagagttggaagaaaaaaacatcaaagaatttcttcaatccttcgttcacatagtgcaaatgttcattaacacgtccactaccacacccgccccgaggccacctacgccggcaccgactatcgccagtcaacccctctctctgcgccccgaggcttgccggcctgcggctggtggggcggtccacacccggggcctggattttgcgtgcgatatatacatctgggcacctcttgccggcacctgcggagtgctgcttctctcactcgttattacgctgtactgc

SEQ ID NO: 476 - DNA, 1122 bp, synthetic construct; identical to SEQ ID NO: 145
  source 1..1122: mol_type = other DNA

SEQ ID NO: 477 - DNA, 2118 bp, synthetic construct
  source 1..2118: mol_type = other DNA
atggccttaccagtgaccgccttgctcctgccgctggccttgctgctccacgccgccaggccggatattcagatgacccagagcccgagcagcctgagcgcgagcgtgggcgatcgcgtgaccattacctgccgcgcgagccaggatattagcaaatatctgaactggtatcagcagaaaccgggcggcaccgtgaaactgctgatttatcataccagccgcctgcatagcggcgtgccgagccgctttagcggcagcggcagcggcaccgattttaccctgaccattagcagcctgcagccggaagatattgcgacctatttttgccagcagggcaacaccctgccgtatacctttggcggcggcaccaaactggaaattaccggtggcggtggctcgggcggtggtgggtcgggtggcggcggatctcaggtgcagctgcaggaaagcggcccgggcctggtgaaaccgagccagaccctgagcctgacctgcaccgtgagcggcgtgagcctgccggattatggcgtgagctggattcgccagccgccgggcaaaggcctggaatggattggcgtgatttggggcagcgaaaccacctattataacagcgcgctgaaaagccgcctgaccattagcaaagataacagcaaaaaccaggtgagcctgaaactgagcagcgtgaccgcggcggataccgcggtgtattattgcgcgaaacattattattatggcggcagctatgcgatggattattggggccagggcaccagcgtgaccgtgagcagcaccacgacgccagcgccgcgaccaccaacaccggcgcccaccatcgcgtcgcagcccctgtccctgcgcccagaggcgtgccggccagcggcggggggcgcagtgcacacgagggggctggacttcgcctgtgatatctacatctgggcgcccttggccgggacttgtggggtccttctcctgtcactggttatcaccctttactgccggagggaccagaggctgccccccgatgcccacaagccccctgggggaggcagtttccggacccccatccaagaggagcaggccgacgcccactccaccctggccaagatcagagtgaagttcagcaggagcgcagacgcccccgcgtaccagcagggccagaaccagctctataacgagctcaatctaggacgaagagaggagtacgatgttttggacaagagacgtggccgggaccctgagatggggggaaagccgagaaggaagaaccctcaggaaggcctgtacaatgaactgcagaaagataagatggcggaggcctacagtgagattgggatgaaaggcgagcgccggaggggcaaggggcacgatggcctttaccagggtctcagtacagccaccaaggacacctacgacgcccttcacatgcaggccctgccccctcgcggctctggcgagggaaggggttccctgcttacttgcggcgacgtcgaagagaatcccggtccgatggccctcccagtaactgccctccttttgcccctcgcactccttcttcatgccgctcgccccaactgggtcaacgtgattagcgatttgaagaaaatcgaggaccttatacagtctatgcatattgacgctacactgtatactgagagtgatgtacacccgtcctgtaaggtaacggccatgaaatgctttcttctggagctccaggtcatcagcttggagtctggggacgcaagcatccacgatacggttgaaaacctcatcatccttgcgaacaactctctctcatctaatggaaacgttacagagagtgggtgtaaggagtgcgaagagttggaagaaaaaaacatcaaagaatttcttcaatccttcgttcacatagtgcaaatgttcattaacacgtccactaccacacccgccccgaggccacctacgccggcaccgactatcgccagtcaacccctctctctgcgccccgaggcttgccggcctgcggctggtggggcggtccacacccggggcctggattttgcgtgcgatatatacatctgggcacctcttgccggcacctgcggagtgctgcttctctcactcgttattacgctgtactgc

SEQ ID NO: 478 - DNA, 1443 bp, synthetic construct
  source 1..1443: mol_type = other DNA
atggccttaccagtgaccgccttgctcctgccgctggccttgctgctccacgccgccaggccggatattcagatgacccagagcccgagcagcctgagcgcgagcgtgggcgatcgcgtgaccattacctgccgcgcgagccaggatattagcaaatatctgaactggtatcagcagaaaccgggcggcaccgtgaaactgctgatttatcataccagccgcctgcatagcggcgtgccgagccgctttagcggcagcggcagcggcaccgattttaccctgaccattagcagcctgcagccggaagatattgcgacctatttttgccagcagggcaacaccctgccgtatacctttggcggcggcaccaaactggaaattaccggtggcggtggctcgggcggtggtgggtcgggtggcggcggatctcaggtgcagctgcaggaaagcggcccgggcctggtgaaaccgagccagaccctgagcctgacctgcaccgtgagcggcgtgagcctgccggattatggcgtgagctggattcgccagccgccgggcaaaggcctggaatggattggcgtgatttggggcagcgaaaccacctattataacagcgcgctgaaaagccgcctgaccattagcaaagataacagcaaaaaccaggtgagcctgaaactgagcagcgtgaccgcggcggataccgcggtgtattattgcgcgaaacattattattatggcggcagctatgcgatggattattggggccagggcaccagcgtgaccgtgagcagcaccacgacgccagcgccgcgaccaccaacaccggcgcccaccatcgcgtcgcagcccctgtccctgcgcccagaggcgtgccggccagcggcggggggcgcagtgcacacgagggggctggacttcgcctgtgatatctacatctgggcgcccttggccgggacttgtggggtccttctcctgtcactggttatcaccctttactgccggagggaccagaggctgccccccgatgcccacaagccccctgggggaggcagtttccggacccccatccaagaggagcaggccgacgcccactccaccctggccaagatcagagtgaagttcagcaggagcgcagacgcccccgcgtaccagcagggccagaaccagctctataacgagctcaatctaggacgaagagaggagtacgatgttttggacaagagacgtggccgggaccctgagatggggggaaagccgagaaggaagaaccctcaggaaggcctgtacaatgaactgcagaaagataagatggcggaggcctacagtgagattgggatgaaaggcgagcgccggaggggcaaggggcacgatggcctttaccagggtctcagtacagccaccaaggacacctacgacgcccttcacatgcaggccctgccccctcgc

SEQ ID NO: 479 - protein, 15 aa, synthetic construct
EPKSCDKTHTCPPCP

SEQ ID NO: 480 - protein, 12 aa, synthetic construct
ERKCCVECPPCP

SEQ ID NO: 481 - protein, 60 aa, synthetic construct
ELKTPLGDTHTCPRCPEPKSCDTPPPCPRCPEPKSCDTPPPCPRCPEKSCDTPPPCPRCP

SEQ ID NO: 482 - protein, 12 aa, synthetic construct
ESKYGPPCPSCP

SEQ ID NO: 483 - protein, 12 aa, synthetic construct
ESKYGPPCPPCP

SEQ ID NO: 484 - protein, 9 aa, synthetic construct
YGPPCPPCP

SEQ ID NO: 485 - protein, 10 aa, synthetic construct
KYGPPCPPCP

SEQ ID NO: 486 - protein, 13 aa, synthetic construct
EVVKYGPPCPPCP

SEQ ID NO: 487 - protein, 39 aa, synthetic construct
IEVMYPPPYLDNEKSNGTIIHVKGKHLCPSPLFPGPSKP

SEQ ID NO: 488 - DNA, 20 bp, synthetic construct
  source 1..20: mol_type = other DNA
atcaccaagcccgcgaccaa

SEQ ID NO: 489 - DNA, 612 bp, synthetic construct
  source 1..612: mol_type = other DNA
atggccctcccagtaactgccctccttttgcccctcgcactccttcttcatgccgctcgccccaactgggtcaacgtgattagcgatttgaagaaaatcgaggaccttatacagtctatgcatattgacgctacactgtatactgagagtgatgtacacccgtcctgtaaggtaacggccatgaaatgctttcttctggagctccaggtcatcagcttggagtctggggacgcaagcatccacgatacggttgaaaacctcatcatccttgcgaacaactctctctcatctaatggaaacgttacagagagtgggtgtaaggagtgcgaagagttggaagaaaaaaacatcaaagaatttcttcaatccttcgttcacatagtgcaaatgttcattaacacgtccactaccacacccgccccgaggccacctacgccggcaccgactatcgccagtcaacccctctctctgcgccccgaggcttgccggcctgcggctggtggggcggtccacacccggggcctggattttgcgtgcgatatatacatctgggcacctcttgccggcacctgcggagtgctgcttctctcactcgttattacgctgtactgc

SEQ ID NO: 490 - protein, 204 aa, synthetic construct
MALPVTALLLPLALLLHAARPNWVNVISDLKKIEDLIQSMHIDATLYTESDVHPSCKVTAMKCFLLELQVISLESGDASIHDTVENLIILANNSLSSNGNVTESGCKECEELEEKNIKEFLQSFVHIVQMFINTSTTTPAPRPPTPAPTIASQPLSLRPEACRPAAGGAVHTRGLDFACDIYIWAPLAGTCGVLLLSLVITLYC

SEQ ID NO: 491 - DNA, 20 bp, synthetic construct
  source 1..20: mol_type = other DNA
ccgatcgtgaagcgcctgct

SEQ ID NO: 492 - DNA, 20 bp, synthetic construct
  source 1..20: mol_type = other DNA
cgagaaggcggtcaagagcc

SEQ ID NO: 493 - DNA, 20 bp, synthetic construct
  source 1..20: mol_type = other DNA
cttggtgttgacgttctgcg

SEQ ID NO: 494 - DNA, 20 bp, synthetic construct
  source 1..20: mol_type = other DNA
ctctgctgtttcaccatcca

SEQ ID NO: 495 - DNA, 20 bp, synthetic construct
  source 1..20: mol_type = other DNA
cccggcttgggcggtgctcc

SEQ ID NO: 496 - DNA, 20 bp, synthetic construct
  source 1..20: mol_type = other DNA
cgactaccagttgtccaagc

SEQ ID NO: 497 - DNA, 20 bp, synthetic construct
  source 1..20: mol_type = other DNA
gactgagttattggcgtggc

SEQ ID NO: 498 - DNA, 20 bp, synthetic construct
  source 1..20: mol_type = other DNA
gaatgttccattgataagcc

SEQ ID NO: 499 - DNA, 20 bp, synthetic construct
  source 1..20: mol_type = other DNA
gagaggctgaggtttgcccc

SEQ ID NO: 500 - DNA, 20 bp, synthetic construct
  source 1..20: mol_type = other DNA
cctcaccatgcctagccttt

SEQ ID NO: 501 - DNA, 20 bp, synthetic construct
  source 1..20: mol_type = other DNA
cgatctggggtgggagttcg

SEQ ID NO: 502 - DNA, 20 bp, synthetic construct
  source 1..20: mol_type = other DNA
gtttgaccgctccacgagcc

SEQ ID NO: 503 - DNA, 20 bp, synthetic construct
  source 1..20: mol_type = other DNA
gatacggtaggcgtagatga

SEQ ID NO: 504 - DNA, 20 bp, synthetic construct
  source 1..20: mol_type = other DNA
gattcacaaccgaattggtg

SEQ ID NO: 505 - DNA, 20 bp, synthetic construct
  source 1..20: mol_type = other DNA
gggctcctcggtgtacatca

SEQ ID NO: 506 - DNA, 20 bp, synthetic construct
  source 1..20: mol_type = other DNA
ctatttgcggatcttcctgg

SEQ ID NO: 507 - DNA, 20 bp, synthetic construct
  source 1..20: mol_type = other DNA
gtactcccctgtatcgttca

SEQ ID NO: 508 - DNA, 20 bp, synthetic construct
  source 1..20: mol_type = other DNA
tggggccactcgatccttga

SEQ ID NO: 509 - DNA, 20 bp, synthetic construct
  source 1..20: mol_type = other DNA
acctatcatacgtatcctgg

SEQ ID NO: 510 - DNA, 20 bp, synthetic construct
  source 1..20: mol_type = other DNA
agtgtacgtcccatcagggt

SEQ ID NO: 511 - DNA, 20 bp, synthetic construct
  source 1..20: mol_type = other DNA
atgtggaagtcacgcccgtt

SEQ ID NO: 512 - DNA, 20 bp, synthetic construct
  source 1..20: mol_type = other DNA
gcagttgtgtgacacggaag

SEQ ID NO: 513 - DNA, 20 bp, synthetic construct
  source 1..20: mol_type = other DNA
cagcttgtccaactggtcgg

SEQ ID NO: 514 - DNA, 20 bp, synthetic construct
  source 1..20: mol_type = other DNA
agttgagctggcaatcaggg

SEQ ID NO: 515 - DNA, 20 bp, synthetic construct
  source 1..20: mol_type = other DNA
agaagtggaatacagagcgg

SEQ ID NO: 516 - DNA, 20 bp, synthetic construct
  source 1..20: mol_type = other DNA
aatgtgactctagcagacag

SEQ ID NO: 517 - DNA, 20 bp, synthetic construct
  source 1..20: mol_type = other DNA
ctaaatggggatttccgcaa

SEQ ID NO: 518 - DNA, 20 bp, synthetic construct
  source 1..20: mol_type = other DNA
gagtcacattctctatggtc

SEQ ID NO: 519 - DNA, 20 bp, synthetic construct
  source 1..20: mol_type = other DNA
tgtacttgacgcatcgcgcc

SEQ ID NO: 520 - DNA, 20 bp, synthetic construct
  source 1..20: mol_type = other DNA
tactgacgccaagacagagt

SEQ ID NO: 521 - DNA, 20 bp, synthetic construct
  source 1..20: mol_type = other DNA
tatcagccactaatgaagtt

SEQ ID NO: 522 - DNA, 20 bp, synthetic construct
  source 1..20: mol_type = other DNA
tgtagactgccaaagtgtat

SEQ ID NO: 523 - protein, 107 aa, synthetic construct [sequence omitted]

SEQ ID NO: 524 - protein, 122 aa, synthetic construct [sequence omitted]

SEQ ID NO: 525 - protein, 398 aa, synthetic construct
YVMDFQVQIFSFLLISASVIMSRGEIVLTQSPATLSLSPGERATLSCRASQSVSSYLAWYQQKPGQAPRLLIYDASNRATGIPARFSGSGSGTDFTLTISSLEPEDFAVYYCQQRSNWPPTFGQGTKVEIKGSTSGSGKSSEGKGEVQLLESGGGLVQPGGSLRLSCAVSGFTFNSFAMSWVRQAPGKGLEWVSAISGSGGGTYYADSVKGRFTISRDNSKNTLYLQMNSLRAEDTAVYFCAKDKILWFGEPVFDYWGQGTLVTVSSLSNSIMYFSHFVPVFLPAKPTTTPAPRPPTPAPTIASQPLSLRPEACRPAAGGAVHTRGLDFACDIYIWAPLAGTCGVLLLSLVITLYCNHRSQVRKAAITSYEKSDGVYTGLSTRNQETYETLKHEKPPQ

SEQ ID NO: 526 - protein, 6 aa, synthetic construct
QSVSSY

SEQ ID NO: 527 - skipped

SEQ ID NO: 528 - protein, 9 aa, synthetic construct
QQRSNWPPT

SEQ ID NO: 529 - protein, 8 aa, synthetic construct
GFTFNSFA

SEQ ID NO: 530 - protein, 9 aa, synthetic construct
ISGSGGGTY

SEQ ID NO: 531 - protein, 15 aa, synthetic construct
AKDKILWFGEPVFDY

SEQ ID NO: 532 - protein, 243 aa, synthetic construct
DIQMTQSTSSLSASLGDRVTISCSASQGINNYLNWYQQKPDGTVELLIYYTSTLQSGVPSRFSGSGSGTDYSLTISNLEPEDIGTYYCQQYSKLPRTFGGGTKLEIKGSTSGSGKSSEGKGQVQLQQSGSELMMPGASVKISCKATGYTFSNYWIEWVKQRPGHGLEWIGEILPGTGRTIYNEKFKGKATFTADISSNTVQMQLSSLTSEDSAVYYCARRDYYGNFYYAMDYWGQGTSVTVSS

SEQ ID NO: 533 - protein, 107 aa, synthetic construct
DIQMTQSTSSLSASLGDRVTISCSASQGINNYLNWYQQKPDGTVELLIYYTSTLQSGVPSRFSGSGSGTDYSLTISNLEPEDIGTYYCQQYSKLPRTFGGGTKLEIK

SEQ ID NO: 534 - protein, 122 aa, synthetic construct
QVQLQQSGSELMMPGASVKISCKATGYTFSNYWIEWVKQRPGHGLEWIGEILPGTGRTIYNEKFKGKATFTADISSNTVQMQLSSLTSEDSAVYYCARRDYYGNFYYAMDYWGQGTSVTVSS

SEQ ID NO: 535 - protein, 353 aa, synthetic construct
MDFQVQIFSFLLISASVIMSRGDIQMTQSTSSLSASLGDRVTISCSASQGINNYLNWYQQKPDGTVELLIYYTSTLQSGVPSRFSGSGSGTDYSLTISNLEPEDIGTYYCQQYSKLPRTFGGGTKLEIKGSTSGSGKSSEGKGQVQLQQSGSELMMPGASVKISCKATGYTFSNYWIEWVKQRPGHGLEWIGEILPGTGRTIYNEKFKGKATFTADISSNTVQMQLSSLTSEDSAVYYCARRDYYGNFYYAMDYWGQGTSVTVSSAAAKGKHLCPSPLFPGPSKPFWVLVVVGGVLACYSLLVTVAFIIFWVRSKRSRLLHSDYMNMTPRRPGPTRKHYQPYAPPRDFAAYRS

SEQ ID NO: 536 - protein, 6 aa, synthetic construct
QGINNY

SEQ ID NO: 537 - skipped

SEQ ID NO: 538 - protein, 9 aa, synthetic construct
QQYSKLPRT

SEQ ID NO: 539 - protein, 8 aa, synthetic construct
GYTFSNYW

SEQ ID NO: 540 - protein, 9 aa, synthetic construct
ILPGTGRTI

SEQ ID NO: 541 - protein, 15 aa, synthetic construct
ARRDYYGNFYYAMDY

SEQ ID NO: 542 - protein, 243 aa, synthetic construct; identical to SEQ ID NO: 532

SEQ ID NO: 543 - protein, 353 aa, synthetic construct; identical to SEQ ID NO: 535

SEQ ID NO: 544 - DNA, 20 bp, synthetic construct
  source 1..20: mol_type = other DNA
tgggcagtcctattacagct

SEQ ID NO: 545 - DNA, 20 bp, synthetic construct
  source 1..20: mol_type = other DNA
atgatagtcactgacaacaa

SEQ ID NO: 546 - DNA, 20 bp, synthetic construct
  source 1..20: mol_type = other DNA
agttgctcatgcaggatttc

SEQ ID NO: 547 - DNA, 20 bp, synthetic construct
  source 1..20: mol_type = other DNA
gaagccacaggaagtctgtg

SEQ ID NO: 548 - DNA, 20 bp, synthetic construct
  source 1..20: mol_type = other DNA
gaagctcattgttgggatcc

SEQ ID NO: 549 - DNA, 20 bp, synthetic construct
  source 1..20: mol_type = other DNA
aacaactatcgttaccacag

SEQ ID NO: 550 - DNA, 20 bp, synthetic construct
  source 1..20: mol_type = other DNA
tgaacaggaaataacctatg

SEQ ID NO: 551 - DNA, 20 bp, synthetic construct
  source 1..20: mol_type = other DNA
ggttttcgttgctgcctctt

SEQ ID NO: 552 - DNA, 20 bp, synthetic construct
  source 1..20: mol_type = other DNA
tccccgaaaaggtcgaattt

SEQ ID NO: 553 - DNA, 20 bp, synthetic construct
  source 1..20: mol_type = other DNA
atctgcggcagcttgcttag

SEQ ID NO: 554 - DNA, 20 bp, synthetic construct
  source 1..20: mol_type = other DNA
gggtattattgatgctattc

SEQ ID NO: 555 - DNA, 20 bp, synthetic construct
  source 1..20: mol_type = other DNA
gatttcctcctcgaccacca

SEQ ID NO: 556 - DNA, 20 bp, synthetic construct
  source 1..20: mol_type = other DNA
cttcgaatcgaataccaaga

SEQ ID NO: 557 - DNA, 20 bp, synthetic construct
  source 1..20: mol_type = other DNA
gcttaaacaatttgacagtg

SEQ ID NO: 558 - DNA, 20 bp, synthetic construct
  source 1..20: mol_type = other DNA
ccaagacggaaaattcagat

SEQ ID NO: 559 - DNA, 20 bp, synthetic construct
  source 1..20: mol_type = other DNA
ccaatctgaattttccgtct

SEQ ID NO: 560 - DNA, 20 bp, synthetic construct
  source 1..20: mol_type = other DNA
cggtccagctgacgtcttaa

SEQ ID NO: 561 - DNA, 20 bp, synthetic construct
  source 1..20: mol_type = other DNA
catcttggtactcaatccgc

SEQ ID NO: 562 - DNA, 20 bp, synthetic construct
  source 1..20: mol_type = other DNA
gcacctacagaagatgccgg

SEQ ID NO: 563 - DNA, 20 bp, synthetic construct
  source 1..20: mol_type = other DNA
gacagcgtgaacaggtagct

SEQ ID NO: 564 - DNA, 20 bp, synthetic construct
  source 1..20: mol_type = other DNA
gacagcgtgaacaggtagct

SEQ ID NO: 565 - DNA, 20 bp, synthetic construct
  source 1..20: mol_type = other DNA
actcaatgcgtacattggtg

SEQ ID NO: 566 - DNA, 20 bp, synthetic construct
  source 1..20: mol_type = other DNA
ttgccggctgagaaccagat

SEQ ID NO: 567 - DNA, 20 bp, synthetic construct
  source 1..20: mol_type = other DNA
gagaagtagcagccatgtac

SEQ ID NO: 568 - DNA, 20 bp, synthetic construct
  source 1..20: mol_type = other DNA
gcccataggtgaaggcgtct

SEQ ID NO: 569 - DNA, 20 bp, synthetic construct
  source 1..20: mol_type = other DNA
ccaatcatgctgctggtgga

SEQ ID NO: 570 - protein, 118 aa, synthetic construct
EVQLQQSGPELVKPGASVKMSCKASGYTFTSYVMHWVKQKPGQGPDWIGYINPYNDATKYNEKFKGKATLTSDKSSSTAYMELSSLTSEDSAVYYCARGGYDYDGDYWGQGTTLTVSS

SEQ ID NO: 571 - protein, 122 aa, synthetic construct
EVQLQQSGPELVKPGASVKMSCKASGYTFTRYILHWVKLKPGQGLEWIGYINPYNDGTKYNEKFKGKATLTSDKSSSTAYMELSRLTSYDSAVYYCARDSSGYGGAYAMDFWGQGTSVTVSS

SEQ ID NO: 572 - protein, 120 aa, synthetic construct
EVQLVESGGGLVKPGGSLKLSCAASGFTFSSYAMSWVRQTPEKRLEWVAAINSNGGNTYYPDTVKDRFTISRDNAKNTLYLQMSSLRSEDTALYYCARHRGGFYYAVDYWGQGTSVTVSS

SEQ ID NO: 573 - protein, 116 aa, synthetic construct
EVQLQQSGPELVKPGASVKISCKASGYSFTGYYIDWVKQSPGKSLEWIGYIYPSNGETSYNQKFKGKATLTVDKSSSTVNMQLNSLTSEDSAVYYCARESYAMDYWGQGTSVTVSS

SEQ ID NO: 574 - protein, 119 aa, synthetic construct
DVQLQESGPGLVKPSQTVSLTCTVTGYSITNGNHWWSWIRQVSGSKLEWMGYISSSGSTDSNPSLKSRISITRDTSKNQLFLHLNSVTTEDIATYYCATTGTWGYFDYWGQGTTLTVSS

SEQ ID NO: 575 - protein, 118 aa, synthetic construct
EVQLQQSGPELVKPGTSVKMSCKASGYTFTSYVMHWVKQKPGQGLEWIGYVIPYNDGTKYNEKFKGKATLTSDKSSSTAYMELSSLTSEDSAVYYCARPSNWDEFDYWGQGTTLTVSS

SEQ ID NO: 576 - protein, 116 aa, synthetic construct
QVQLQQPGAELVKPGASVKLSCKASGYTFTNYWMNWVKQRPGRGLEWIGRIHPSDSETHYNQKFKTKATLTVDKSSSTAYIQLSSLTSEDSAVYYCARYDGYFAYWGQGTLVTVSA

SEQ ID NO: 577 - protein, 120 aa, synthetic construct
QVTLKESGPGILQPSQTLSLTCSFSGFSLSTFGMGVGWIRQPSGKGLEWLAHIWWDDDKYYNPALKSRLTISKDTSKNQVFLKIANVDIADTATYYCARTYDYDEYFDYWGQGTTLTVSS

SEQ ID NO: 578 - protein, 119 aa, synthetic construct
QVQLQQPGAELVQPGASVKLSCKASGYTFTSYWMNWMKQRPGRGLEWIGRIHPSDSETHYNQKFRTKATLTVDKSSSTAYIQLSSLTSEDSAVYYCAREDGYYWYFDVWGAGTTVTVSS

SEQ ID NO: 579 - protein, 117 aa, synthetic construct
EVQLQQSGAELVKPGASVKIPCKASGYKFTDFNMDWVKQSHGKSLEWIGDINPNSGGTIYNQKFKGKATLTVDKSLSTAYMELGSLTSEDTAVYYCARWDYGNFAYWGQGTLVTVSA

SEQ ID NO: 580 - protein, 119 aa, synthetic construct
QVQLQQPGAELVKPGASVKLSCKASGYTFTNYWMNWVKQRPGRGLEWIGRIHPSDSETHYNQKFKSKATLTVDKSSSTAYIQLSSLTSEDSAVYYCAREDGYYWYFDVWGAGTTVTVSS

SEQ ID NO: 581 - protein, 120 aa, synthetic construct
EVQLVESGGGLVKPGGSLKLSCAASGFTFSSYAMSWVRQTPEKRLEWVAAINSNGGRNYYPDTVKDRFTISRDNAKNTLYLQMSSLRSEDTALYYCARHRGGYYYAMDYWGQGTSVTVSS

SEQ ID NO: 582 - protein, 107 aa, synthetic construct
DIQMNQSPSSLSASLGDSITITCHASQNINVWLSWYQQKPGNIPKLLIYKASNLHTGVPSRFSGSGSGTGFTLTISSLQPEDIATYYCQQGQSYPFTFGSGTKLEIK

SEQ ID NO: 583 - protein, 107 aa, synthetic construct
DIQMTQSPASLSASVGETVTITCRASGNIHNYLAWYQQKQGRSPQLLVYNAKTLPYGVPSRFSGSGSGTQYSLKINSLQPEDFGSYYCQHFWTTPWTFGGGTKLEIK

SEQ ID NO: 584 - protein, 112 aa, synthetic construct
NIMMTQSPSSLAVSAGEKVTMSCKSSQSVLYSSNQKNYLAWYQQKPGQSPKLLIYWASTRESGVPDRFTGSGSGTDFTLTISSVQAEDLAVYYCHQYLSSRTFGGGTKLEIK

SEQ ID NO: 585 - protein, 111 aa, synthetic construct
DIVLTQSPASLAVSLGQRATISCRASKSVSTSGYSYMHWYQQKPGQPPKLLIYLASNLESGVPARFSGSGSGTDFTLNIHPVEEEDAATYYCQHSRELPYTFGGGTKLEIK

SEQ ID NO: 586 - protein, 107 aa, synthetic construct
NIVMTQSPKSMSMSVGERVTLSCKASENVGTYVSWYQQKPEQSPKLLIYGASNRFTGVPDRFTGSGSATDFTLTISSVQAEDLADYHCGQSYSYPFTFGSGTKLEIK

SEQ ID NO: 587 - protein, 107 aa, synthetic construct
DIVMTQSQKFMSTSVGDRVSITCKASQNVRTAVAWYQQKPGQSPKALIYLASNRHTGVPDRFTGSGSGTDFTLTISNVQSEDLADYFCLQHWNYPLTFGAGTKLELK

SEQ ID NO: 588 - protein, 107 aa, synthetic construct
DIQMTQSSSYLSVSLGGRVTITCKASDHINNWLAWYQQKPGNAPRLLISGATSLETGDPSRFSGSGSGKDYTLSITSLQIEDVATYYCQQYWSIPFTFGAGTKLELK

SEQ ID NO: 589 - protein, 112 aa, synthetic construct
DIVMTQAAFSNPVTLGTSASISCRSSKSLLHSNGITYFYWYLQKPGQSPQLLIYQMSNLASGVPDRFSSSGSGTDFTLRISRVEAEDVGVYYCAQNLELPFTFGSGTKLEIK

SEQ ID NO: 590 - protein, 111 aa, synthetic construct
NIVLTQSPASLAVSLGQRATISCRASESVDIYGNSFMHWYQQKPGQPPKLLIYLASNLESGVPARFSGSGSRTDFTLTIDPVEADDAATYYCQQNNEDPWTFGGGTKLEIK

SEQ ID NO: 591 - protein, 112 aa, synthetic construct
DIVMTQAAFSNPVTLGTSASISCRSSKSLLHSNGITYLYWYLQKPGQSPQLLIYQMSNLASGVPDRFSSSGSGTDFTLRISRVEAEDVGVYYCAQNLELPLTFGAGTKLELK

SEQ ID NO: 592 - protein, 111 aa, synthetic construct
NIVLTQSPASLAVSLGQRATISCRASESVDSYGNSFMHWYQQKPGQPPKLLIYLASNLESGVPARFSGSGSRTDFTLTIDPVEADDAATYYCQQNHEDPWTFGGGTKLEIK

SEQ ID NO: 593 - protein, 112 aa, synthetic construct
DIVMSQSPSSLAVSVGEKVTMSCKSSQSLLYSSNQKNYLAWYQQKPGQSPKLLIYWASTRESGVPDRFTGSGSGTDFTLTISSVKAEDLAVYYCQQYYTYLTFGAGTKLELK

SEQ ID NO: 594 - protein, 918 aa, synthetic construct
MALPVTALLLPLALLLHAARPDIQMTQSPSSLSASVGDRVTITCSASSSVSYMYWYQQKPGKAPKLLIYLTSNLASGVPSRFSGSGSGTDFTLTISSLQPEDFATYYCQQWRSNPFTFGQGTKLEIKRGGGGSGGGGSGGGGSQITLKESGPTLVKPTQTLTLTCTFSGFSLSTSGMGVGWIRQPPGKALEWLAHIWWDDVKRYSPSLKSRLTITKDTSKNQVVLTMTNMDPVDTATYYCARIVSFDNDVVSAMDYWGQGTLVTVSSTREQKLISEEDLAKPTTTPAPRPPTPAPTIASQPLSLRPEACRPAAGGAVHTRGLDFACDIYIWAPLAGTCGVLLLSLVITLYCGRARVKFSRSADAPAYQQGQNQLYNELNLGRREEYDVLDKRRGRDPEMGGKPRRKNPQEGLYNELQKDKMAEAYSEIGMKGERRRGKGHDGLYQGLSTATKDTYDALHMQALPPRSRGSGATNFSLLKQAGDVEENPGPGIHMATYEVLCEVARKLGTDDREVVLFLLNVFIPQPTLAQLIGALRALKEEGRLTFPLLAECLFRAGRRDLLRDLLHLDPRFLERHLAGTMSYFSPYQLTVLHVDGELCARDIRSLIFLSKDTIGSRSTPQTFLHWVYCMENLDLLGPTDVDALMSMLRSLSRVDLQRQVQTLMGLHLSGPSHSQHYRHTPLETDFYDYKDDDDKTSGSGEGRGSLLTCGDVEENPGPHMTEYKPTVRLATRDDVPRAVRTLAAAFADYPATRHTVDPDRHIERVTELQELFLTRVGLDIGKVWVADDGAAVAVWTTPESVEAGAVFAEIGPRMAELSGSRLAAQQQMEGLLAPHRPKEPAWFLATVGVSPDHQGKGLGSAVVLPGVEAAERAGVPAFLETSAPRNLPFYERLGFTVTADVEVPEGPRTWCMTRKPGA

SEQ ID NO: 595 - protein, 913 aa, synthetic construct
MALPVTALLLPLALLLHAARPEIVMTQSPATLSVSPGERATLSCKASQSVSNDVVWYQQKPGQAPRLLIYYASNRYTGIPARFSGSGSGTEFTLTISSLQSEDFAVYYCQQDYTSPWTFGQGTKLEIKRGGGGSGGGGSGGGGSQVQLVQSGAEVKKPGASVKVSCKASGYTFTNYGMNWVRQAPGQGLEWMGWINTYTGEPTYADDFKGRVTMTTDTSTSTAYMELRSLRSDDTAVYYCARIGDSSPSDYWGQGTLVTVSSTREQKLISEEDLAKPTTTPAPRPPTPAPTIASQPLSLRPEACRPAAGGAVHTRGLDFACDIYIWAPLAGTCGVLLLSLVITLYCGRARVKFSRSADAPAYQQGQNQLYNELNLGRREEYDVLDKRRGRDPEMGGKPRRKNPQEGLYNELQKDKMAEAYSEIGMKGERRRGKGHDGLYQGLSTATKDTYDALHMQALPPRSRGSGATNFSLLKQAGDVEENPGPGIHMATYEVLCEVARKLGTDDREVVLFLLNVFIPQPTLAQLIGALRALKEEGRLTFPLLAECLFRAGRRDLLRDLLHLDPRFLERHLAGTMSYFSPYQLTVLHVDGELCARDIRSLIFLSKDTIGSRSTPQTFLHWVYCMENLDLLGPTDVDALMSMLRSLSRVDLQRQVQTLMGLHLSGPSHSQHYRHTPLETDFYDYKDDDDKTSGSGEGRGSLLTCGDVEENPGPHMTEYKPTVRLATRDDVPRAVRTLAAAFADYPATRHTVDPDRHIERVTELQELFLTRVGLDIGKVWVADDGAAVAVWTTPESVEAGAVFAEIGPRMAELSGSRLAAQQQMEGLLAPHRPKEPAWFLATVGVSPDHQGKGLGSAVVLPGVEAAERAGVPAFLETSAPRNLPFYERLGFTVTADVEVPEGPRTWCMTRKPGA

SEQ ID NO: 596 - DNA, 738 bp, synthetic construct
  source 1..738: mol_type = other DNA
gacatccagatgacccagagccccagcagcctgtctgccagcgtgggcgacagagtgaccatcacctgtagcgccagcagcagcgtgtcctacatgtactggtatcagcagaagcccggcaaggcccccaagctgctgatctacctgaccagcaatctggcctccggcgtgcccagcagattttctggcagcggctccggcaccgacttcaccctgacaatcagctccctccagcccgaggacttcgccacctactactgtcagcagtggcggagcaaccccttcaccttcggccagggcaccaagctggaaatcaagagaggcggaggcggaagtggaggcggaggatctggcggcggaggctctcagatcaccctgaaagagtccggccccaccctcgtgaagcctacccagaccctgacactgacctgcaccttcagcggcttcagcctgagcacaagcggcatgggcgtgggctggatcagacagcctcctggaaaggccctggaatggctggcccacatttggtgggacgacgtgaagcggtacagccccagcctgaagtcccggctgaccattaccaaggacaccagcaagaaccaggtggtgctgaccatgacaaacatggaccccgtggacaccgccacatattactgcgcccggatcgtgtccttcgacaacgacgtggtgtccgctatggactactggggccagggaaccctcgtgaccgtgtctagt

SEQ ID NO: 597 - DNA, 723 bp, synthetic construct
  source 1..723: mol_type = other DNA
gagatcgtgatgacccagagccctgccaccctgtccgtgtctccaggcgaaagagccaccctgagctgcaaggcttcccagagcgtgtccaacgacgtcgtgtggtatcagcagaagcccggccaggcccccagactgctgatctactacgccagcaacagatacaccggcatccccgccagattcagcggctctggcagcggcaccgagttcaccctgacaatcagcagcctccagagcgaggacttcgccgtgtactactgtcagcaggactacaccagcccctggaccttcggccagggcaccaagctggaaatcaagagaggcggaggcggaagtggaggcggaggatctggcggcggaggctctcaggtgcaactggtgcagagcggagccgaagtgaagaaacctggggccagcgtgaaggtgtcctgcaaggccagcggctacacctttaccaactacggcatgaactgggtgcgccaggctcctggacagggcctggaatggatgggctggatcaacacctacaccggcgagcccacctacgccgacgacttcaagggcagagtgaccatgaccaccgacaccagcacctccaccgcctacatggaactgcggagcctgagaagcgacgacaccgccgtgtattattgcgcccggatcggcgacagcagccccagcgattattggggccagggaaccctcgtgaccgtgtcctct

SEQ ID NO: 598 - protein, 246 aa, synthetic construct
DIQMTQSPSSLSASVGDRVTITCSASSSVSYMYWYQQKPGKAPKLLIYLTSNLASGVPSRFSGSGSGTDFTLTISSLQPEDFATYYCQQWRSNPFTFGQGTKLEIKRGGGGSGGGGSGGGGSQITLKESGPTLVKPTQTLTLTCTFSGFSLSTSGMGVGWIRQPPGKALEWLAHIWWDDVKRYSPSLKSRLTITKDTSKNQVVLTMTNMDPVDTATYYCARIVSFDNDVVSAMDYWGQGTLVTVSS

SEQ ID NO: 599 - protein, 241 aa, synthetic construct
EIVMTQSPATLSVSPGERATLSCKASQSVSNDVVWYQQKPGQAPRLLIYYASNRYTGIPARFSGSGSGTEFTLTISSLQSEDFAVYYCQQDYTSPWTFGQGTKLEIKRGGGGSGGGGSGGGGSQVQLVQSGAEVKKPGASVKVSCKASGYTFTNYGMNWVRQAPGQGLEWMGWINTYTGEPTYADDFKGRVTMTTDTSTSTAYMELRSLRSDDTAVYYCARIGDSSPSDYWGQGTLVTVSS

SEQ ID NO: 600 - protein, 118 aa, synthetic construct
QVQLQQSGSEMARPGASVKLPCKASGDTFTSYWMHWVKQRHGHGPEWIGNIYPGSGGTNYAEKFKNKVTLTVDRSSRTVYMHLSRLTSEDSAVYYCTRSGGPYFFDYWGQGTTLTVSS

SEQ ID NO: 601 - protein, 115 aa, synthetic construct
DILMTQSPLSLPVSLGDQASISCRSSQNIVHNNGITYLEWYLQRPGQSPKLLIYKVSDRFSGVPDRFSGSGSGTDFTLKISRVEAEDLGIYYCFQGSHIPPTFGGGTKLEIKRAA

SEQ ID NO: 602 - protein, 486 aa, synthetic construct
MGGLEPCSRFLLLPLLLAVSGLRPVQVQAQSDCSCSTVSPGVLAGIVMGDLVLTVLIALAVYFLGRLVPRGRGAAEAATRKQRITETESPYQELQGQRSDVYSDLNTQRPYYKVEGGGEGRGSLLTCGDVEENPGPRMALPVTALLLPLALLLHAARPGSDVQLQESGPSLVKPSQSLSLTCTVTGYSITSDFAWNWIRQFPGNKLEWMGYISYSGNTRYNPSLKSRISITRDTSKNQFFLQLNSVTIEDTATYYCVTAGRGFPYWGQGTLVTVSAGGGGSGGGGSSGGGSDILMTQSPSSMSVSLGDTVSITCHSSQDINSNIGWLQQRPGKSFKGLIYHGTNLDDEVPSRFSGSGSGADYSLTISSLESEDFADYYCVQYAQFPWTFGGGTKLEIKRASGGGGSGGGGSSPTEPSSKTGNPRHLHVLIGTSVVKIPFTILLFFLLHRWCSNKKNAAVMDQEPAGNRTVNSEDSDEQDHQEVSYA

SEQ ID NO: 603 - protein, 483 aa, synthetic construct
MALPVTALLLPLALLLHAARPDVQLQESGPSLVKPSQSLSLTCTVTGYSITSDFAWNWIRQFPGNKLEWMGYISYSGNTRYNPSLKSRISITRDTSKNQFFLQLNSVTIEDTATYYCVTAGRGFPYWGQGTLVTVSAGGGGSGGGGSSGGGSDILMTQSPSSMSVSLGDTVSITCHSSQDINSNIGWLQQRPGKSFKGLIYHGTNLDDEVPSRFSGSGSGADYSLTISSLESEDFADYYCVQYAQFPWTFGGGTKLEIKRTTTPAPRPPTPAPTIASQPLSLRPEACRPAAGGAVHTRGLDFACDIYIWAPLAGTCGVLLLSLVITLYCKRGRKKLLYIFKQPFMRPVQTTQEEDGCSCRFPEEEEGGCELRVKFSRSADAPAYQQGQNQLYNELNLGRREEYDVLDKRRGRDPEMGGKPRRKNPQEGLYNELQKDKMAEAYSEIGMKGERRRGKGHDGLYQGLSTATKDTYDALHMQALPPR

SEQ ID NO: 604 - protein, 483 aa, synthetic construct
MALPVTALLLPLALLLHAARPQVQLQESGPGLVKPSQTLSLTCTVSGYSISSDFAWNWIRQPPGKGLEWMGYISYSGNTRYQPSLKSRITISRDTSKNQFFLKLNSVTAADTATYYCVTAGRGFPYWGQGTLVTVSSGGGGSGGGGSSGGGSDIQMTQSPSSMSVSVGDRVTITCHSSQDINSNIGWLQQKPGKSFKGLIYHGTNLDDGVPSRFSGSGSGTDYTLTISSLQPEDFATYYCVQYAQFPWTFGGGTKLEIKRTTTPAPRPPTPAPTIASQPLSLRPEACRPAAGGAVHTRGLDFACDIYIWAPLAGTCGVLLLSLVITLYCKRGRKKLLYIFKQPFMRPVQTTQEEDGCSCRFPEEEEGGCELRVKFSRSADAPAYQQGQNQLYNELNLGRREEYDVLDKRRGRDPEMGGKPRRKNPQEGLYNELQKDKMAEAYSEIGMKGERRRGKGHDGLYQGLSTATKDTYDALHMQALPPR

SEQ ID NO: 605 - protein, 482 aa, synthetic construct
MALPVTALLLPLALLLHAARPEVQLQESGPGLVKPSQTLSLTCTVSGYSISRDFAWNWIRQPPGKGLEWMGYISYNGNTRYQPSLKSRITISRDTSKNQFFLKLNSVTAADTATYYCVTASRGFPYWGQGTLVTVSSGGGGSGGGGSSGGGSDIQMTQSPSSMSVSVGDRVTITCHSSQDINSNIGWLQQKPGKSFKGLIYHGTNLDDGVPSRFSGSGSGTDYTLTISSLQPEDFATYYCVQYAQFPWTFGGGTKLEIKTTTPAPRPPTPAPTIASQPLSLRPEACRPAAGGAVHTRGLDFACDIYIWAPLAGTCGVLLLSLVITLYCKRGRKKLLYIFKQPFMRPVQTTQEEDGCSCRFPEEEEGGCELRVKFSRSADAPAYQQGQNQLYNELNLGRREEYDVLDKRRGRDPEMGGKPRRKNPQEGLYNELQKDKMAEAYSEIGMKGERRRGKGHDGLYQGLSTATKDTYDALHMQALPPR

SEQ ID NO: 606 - protein, 121 aa, synthetic construct
EVQLLESGGGLVQPGGSLRLSCAASGFTFSNYDMSWVRQAPGKGLEWVSGISHSSGSKYYADSVKGRFTISRDNSKNTLYLQMNSLRAEDTAVYYCAKDATPRPLKPFDYWGQGTLVTVSS

SEQ ID NO: 607 - protein, 121 aa, synthetic construct
EVQLLESGGGLVQPGGSLRLSCAASGFTFSNYDMSWVRQAPGKCLEWVSGISHSSGSKYYADSVKGRFTISRDNSKNTLYLQMNSLRAEDTAVYYCAKDATPRPLKPFDYWGQGTLVTVSS

SEQ ID NO: 608 - protein, 111 aa, synthetic construct
QSVLTQPPSASGTPGQRVTISCTGSSSNIGNNDVSWYQQLPGTAPKLLIYDDNKRPSGVPDRFSGSKSGTSASLAISGLRSEDEADYYCGSWDASLNAYVFGGGTKLTVLG

SEQ ID NO: 609 - protein, 111 aa, synthetic construct
QSVLTQPPSASGTPGQRVTISCTGSSSNIGNNDVSWYQQLPGTAPKLLIYDDNKRPSGVPDRFSGSKSGTSASLAISGLRSEDEADYYCGSWDASLNAYVFGCGTKLTVLG

SEQ ID NO: 610 - protein, 126 aa, synthetic construct
EVQLVQSGAEVKKPGSSVKVSCKASGGTFSSYAISWVRQAPGQGLEWMGGIIPIFGTANYAQKFQGRVTITADESTSTAYMELSSLRSEDTAVYYCAREEGPYCSSTSCYGAFDIWGQGTLVTVSS

SEQ ID NO: 611 - protein, 126 aa, synthetic construct
EAQLVQSGAEGKKPGSSVKVSCKAPGGTFNSYAISWVRQAPGQGLEWMGGIIPIFGTAYYAQKFQGRVTITADESTSTAYMELSSLRSEDTAVYYCAREEGPYCSSTSCYGAFDIWGRGTLVTVSS

SEQ ID NO: 612 - protein, 126 aa, synthetic construct
EVQLVQSGAEVKKPGSSVKVSCKASGGTFSSYAIGWVRQAPGQGLEWMGGIIPIFGIANYAQKFQGRVTITADESTSSAYMELSSLRSEDTAVYYCAREEGPYCSSTSCYGAFDIWGQGTLVTVSS

SEQ ID NO: 613 - protein, 126 aa, synthetic construct; identical to SEQ ID NO: 612

SEQ ID NO: 614 - protein, 126 aa, synthetic construct
EVQLVQSGAEVKKPGSSVKVSCKASGGTFSSYAISWVRQAPGQGLEWMGGIIPIFGTANYAQKFQGRVTITADESTSTAYMELSSLRSEDTAVYYCAREEGPYCSSTSCYAAFDIWGQGTLVTVSS

SEQ ID NO: 615 - protein, 126 aa, synthetic construct
EVQLVQSGAEVKKPGSSVKVSCKASGGTFSSYAISWVRQAPGQGLEWVGGIIPIFGTANYAQKFQGRVKITADESASTAYMELSSLRSEDTAVYYCAREEGPYCSSTSCYGAFDIWGQGTLVTVSS

SEQ ID NO: 616 - protein, 126 aa, synthetic construct
EVQLVQSGAEVKKLGSSVKVSCKASGGTFSSYAISWVRQAPGQGLEWVGGIIPIFGTANYAQKFQGRVKITADESASTAYMELSSLRSEDTAVYYCAREEGPYCSSTSCYGAFDIWGQGTLVTVSS

SEQ ID NO: 617 - protein, 126 aa, synthetic construct; identical to SEQ ID NO: 615

SEQ ID NO: 618 - protein, 126 aa, synthetic construct; identical to SEQ ID NO: 615

SEQ ID NO: 619 - protein, 126 aa, synthetic construct; identical to SEQ ID NO: 615

SEQ ID NO: 620 - protein, 126 aa, synthetic construct; identical to SEQ ID NO: 615

SEQ ID NO: 621 - protein, 251 aa, synthetic construct
DIVMTQTPLSSPVTLGQPASISCRSSQSLVHSDGNTYLSWLQQRPGQPPRLLIYKISNRFFGVPDRFSGSGAGTDFTLKISRVEAEDVGVYYCMQATQFPHTFGQGTKLEIKGGSEGKSSGSGSESKSTGGSQVTLKESGPVLVKPTETLTLTCTVSGFSLTNIRMSVSWIRQPPGKALEWLAHIFSNDEKSYSSSLKSRLTISRDTSKSQVVLTLTNVDPVDTATYYCARMRLPYGMDVWGQGTTVTVSS

SEQ ID NO: 622 - protein, 251 aa, synthetic construct
QVTLKESGPVLVKPTETLTLTCTVSGFSLTNIRMSVSWIRQPPGKALEWLAHIFSNDEKSYSSSLKSRLTISRDTSKSQVVLTLTNVDPVDTATYYCARMRLPYGMDVWGQGTTVTVSSGGSEGKSSGSGSESKSTGGSDIVMTQTPLSSPVTLGQPASISCRSSQSLVHSDGNTYLSWLQQRPGQPPRLLIYKISNRFFGVPDRFSGSGAGTDFTLKISRVEAEDVGVYYCMQATQFPHTFGQGTKLEIK

SEQ ID NO: 623 - protein, 252 aa, synthetic construct
QLQLQESGPGLVKPSETLSLTCTVSGGSLSSSSYWWGWTRQPPGRGLEWIGTMYYSGNIYYNPSLQSRATISVDTSKNQFSLKLSSVTAADTAVYYCARHVGYSYGRRFWYFDLWGRGTLVTVSSGGSEGKSSGSGSESKSTGGSEIVLTQSPATLSLSPGERATLSCRASQSVSSYLAWYQQKPGQAPRLLIYDASNRATGIPARFSGSGSGTDFTLTISSLEPEDFAVYYCQQRSNWPPTFGQGTKVEIK

SEQ ID NO: 624 - protein, 252 aa, synthetic construct
EIVLTQSPATLSLSPGERATLSCRASQSVSSYLAWYQQKPGQAPRLLIYDASNRATGIPARFSGSGSGTDFTLTISSLEPEDFAVYYCQQRSNWPPTFGQGTKVEIKGGSEGKSSGSGSESKSTGGSQLQLQESGPGLVKPSETLSLTCTVSGGSLSSSSYWWGWTRQPPGRGLEWIGTMYYSGNIYYNPSLQSRATISVDTSKNQFSLKLSSVTAADTAVYYCARHVGYSYGRRFWYFDLWGRGTLVTVSS

SEQ ID NO: 625 - protein, 246 aa, synthetic construct
EIVLTQSPATLSLSPGERATLSCRASQSVSSYLAWYQQKPGQAPRLLIYDASNRATGIPARFSGSGSGTDFTLTISSLEPEDFAVYYCQQRSNWPLTFGQGTKVEIKGTEGKSSGSGSESKSTEVQLVQSGAEVKKPGESLKISCKGSGYSFTSYFIGWVRQMPGKGLEWMGIIYPGKSDTRYSPSFQGQVTISADKSISTAYLQWSSLKASDTAMYYCARVYSFGGRHKALFDYWGQGTLVTVSS

SEQ ID NO: 626 - protein, 243 aa, synthetic construct
DIQMTQSPSSLSASVGDRVTITCRASQSISSYLNWYQQKPGKAPKLLIYAASSLQSGVPSRFSGSGSGTDFTLTISSLQPEDFATYYCQQSYSTPLTFGQGTKVEIKGTEGKSSGSGSESKSTQVQLVQSGAEVKKPGSSVKVSCKASGGTFSSYAISWVRQAPGQGLEWMGGIIPIFGTANYAQKFQGRVTITADESTSTAYMELSSLRSEDTAVYYCARESRWRGYKLDYWGQGTLVTVSS

SEQ ID NO: 627 - protein, 241 aa, synthetic construct
DIQMTQSPSSLSASVGDRVTITCKASQNVATHVGWYQQKPGKAPKRLIYSASYRYSGVPSRFSGSGSGTEFTLTISNLQPEDFATYYCQQYNRYPYTFGQGTKLEIKGTEGKSSGSGSESKSTQVQLVQSGAEVKKPGASVKVSCKASGYSFTGYTMNWVRQAPGQGLEWMGLINPYNSDTNYAQKLQGRVTMTTDTSTSTAYMELRSLRSDDTAVYYCARVALRVALDYWGQGTLVTVSS

SEQ ID NO: 628 - protein, 246 aa, synthetic construct
EVQLVQSGAEVKKPGESLKISCKGSGYSFTSYFIGWVRQMPGKGLEWMGIIYPGKSDTRYSPSFQGQVTISADKSISTAYLQWSSLKASDTAMYYCARVYSFGGRHKALFDYWGQGTLVTVSSGTEGKSSGSGSESKSTEIVLTQSPATLSLSPGERATLSCRASQSVSSYLAWYQQKPGQAPRLLIYDASNRATGIPARFSGSGSGTDFTLTISSLEPEDFAVYYCQQRSNWPLTFGQGTKVEIK

SEQ ID NO: 629 - protein, 243 aa, synthetic construct
QVQLVQSGAEVKKPGSSVKVSCKASGGTFSSYAISWVRQAPGQGLEWMGGIIPIFGTANYAQKFQGRVTITADESTSTAYMELSSLRSEDTAVYYCARESRWRGYKLDYWGQGTLVTVSSGTEGKSSGSGSESKSTDIQMTQSPSSLSASVGDRVTITCRASQSISSYLNWYQQKPGKAPKLLIYAASSLQSGVPSRFSGSGSGTDFTLTISSLQPEDFATYYCQQSYSTPLTFGQGTKVEIK

SEQ ID NO: 630 - protein, 241 aa, synthetic construct
QVQLVQSGAEVKKPGASVKVSCKASGYSFTGYTMNWVRQAPGQGLEWMGLINPYNSDTNYAQKLQGRVTMTTDTSTSTAYMELRSLRSDDTAVYYCARVALRVALDYWGQGTLVTVSSGTEGKSSGSGSESKSTDIQMTQSPSSLSASVGDRVTITCKASQNVATHVGWYQQKPGKAPKRLIYSASYRYSGVPSRFSGSGSGTEFTLTISNLQPEDFATYYCQQYNRYPYTFGQGTKLEIK

SEQ ID NO: 631 - protein, 707 aa, synthetic construct
KSSNEATNITPKHNMKAFLDELKAENIKKFLYNFTQIPHLAGTEQNFQLAKQIQSQWKEFGLDSVELAHYDVLLSYPNKTHPNYISIINEDGNEIFNTSLFEPPPPGYENVSDIVPPFSAFSPQGMPEGDLVYVNYARTEDFFKLERDMKINCSGKIVIARYGKVFRGNKVKNAQLAGAKGVILYSDPADYFAPGVKSYPDGWNLPGGGVQRGNILNLNGAGDPLTPGYPANEYAYRRGIAEAVGLPSIPVHPIGYYDAQKLLEKMGGSAPPDSSWRGSLKVPYNVGPGFTGNFSTQKVKMHIHSTNEVTRIYNVIGTLRGAVEPDRYVILGGHRDSWVFGGIDPQSGAAVVHEIVRSFGTLKKEGWRPRRTILFASWDAEEFGLLGSTEWAEENSRLLQERGVAYINADSSIEGNYTLRVDCTPLMYSLVHNLTKELKSPDEGFEGKSLYESWTKKSPSPEFSGMPRISKLGSGNDFEVFFQRLGIASGRARYTKNWETNKFSGYPLYHSVYETYELVEKFYDPMFKYHLTVAQVRGGMVFELANSIVLPFDCRDYAVVLRKYADKIYSISMKHPQEMKTYSVSFDSLFSAVKNFTEIASKFSERLQDFDKSNPIVLRMMNDQLMFLERAFIDPLGLPDRPFYRHVIYAPSSHNKYAGESFPGIYDALFDIESKVDPSKAWGEVKRQIYVAAFTVQAAAETLSEVA

SEQ ID NO: 632 - protein, 254 aa, synthetic construct
QSVLTQPPSVSGAPGQRVTISCTGSSSNIGAGYDVHWYQQLPGTAPKLLIYGNSNRPSGVPDRFSGSKSGTSASLAITGLQAEDEADYYCQSYDSSLSGYVFGTGTKVTVLGSRGGGGSGGGGSGGGGSLEMAEVQLVQSGAEVKKPGESLKISCKGSGYSFTSYWIGWVRQMPGKGLEWMGIIYPGDSDTRYSPSFQGQVTISADKSISTAYLQWSSLKASDTAMYYCARSMGSSLYASSDVWGQGTLVTVSS

SEQ ID NO: 633 - protein, 249 aa, synthetic construct
QAVLTQPPSASGTPGQRVTISCSGSSSNIGSNTVNWYQQLPGTAPKLLMYSNNQRPSGVPDRFSGSKSGTSASLAISGLQSEDEADYYCAAWDDSLNGYVFGTGTKVTVLGSRGGGGSGGGGSGGGGSLEMAEVQLVQSGAEMKKPGESLKISCKGSGYNFASYWVGWVRQMPGKGLEWMGTIYPDDSDTRYGPAFQGQVTISADKSISTAYLQWSSLKASDTAMYYCARDSYYGIDVWGQGTLVTVSS

SEQ ID NO: 634 - protein, 132 aa, synthetic construct
MSPAQFLFLLVLWIQETNGDVVMTQTPLTLSVTIGQPASISCKSSQSLLYSNGKTYLNWLLQRPGQSPKRLIYLVSKLDSGVPDRFTGSGSGTDFTLKISRVEAEDLGVYYCVQGTHFPHTFGGGTKLEIKR

SEQ ID NO: 635 - protein, 133 aa, synthetic construct
MNFGLSLIFLVLVLKGVQCEVKVVESGGGLVKPGASLKLSCAASGFTFSNYGMSWVRQTSDKRLEWVASISSGGDSTFYADNVKGRFTISRENAKNTLYLQMSSLKSEDTALYYCARDDLFNWGQGTTLTVSS

SEQ ID NO: 636 - protein, 5 aa, synthetic construct
SYYMH

SEQ ID NO: 637 - protein, 17 aa, synthetic construct
IINPSGGSTSYAQKFQG

SEQ ID NO: 638 - protein, 10 aa, synthetic construct
GVGAHDAFDI

SEQ ID NO: 639 - protein, 9 aa, synthetic construct
VVAAAVADY

SEQ ID NO: 640 - protein, 16 aa, synthetic construct
RSSQSLLHSNGNNYLD

SEQ ID NO: 641 - protein, 16 aa, synthetic construct
RSSQSLLHSNGYNYLD

SEQ ID NO: 642 - protein, 7 aa, synthetic construct
LGSNRAS

SEQ ID NO: 643 - protein, 9 aa, synthetic construct
MQGTHPAIS

SEQ ID NO: 644 - protein, 9 aa, synthetic construct
MQSLQTPFT

SEQ ID NO: 645 - protein, 112 aa, synthetic construct
DVVMTQSPLSLPVTPGEPASISCRSSQSLLHSNGNNYLDWYLQKPGQSPQLLIYLGSNRASGVPDRFSGSGSDTDFTLQISRVEAEDVGVYYCMQGTHPAISFGQGTRLEIK

SEQ ID NO: 646 - protein, 119 aa, synthetic construct
EVQLVQSGAEVKKPGASVKVSCKASGYTFTSYYMHWVRQAPGQGLEWMGIINPSGGSTSYAQKFQGRVTMTRDTSTSTVYMELSSLRSEDTAVYYCARGVGAHDAFDIWGQGTTVTVSS

SEQ ID NO: 647 - protein, 107 aa, synthetic construct
DIQMTQSPSSLSASVGDRVTITCRASQDISNYLNWYQQKPGKAPKLLIYYTSRLHSGVPSRFSGSGSGTDFTFTISSLQPEDIATYYCQQYSKLPRTFGGGTKVEIK

SEQ ID NO: 648 - protein, 111 aa, synthetic construct
DIVMTQSPDSLAVSLGERATINCRASKSVSTSGYSYMHWYQQKPGQPPKLLIYLASNLESGVPDRFSGSGSGTDFTLTISSLQAEDVAVYYCQHIRELPYTFGGGTKVEIK

SEQ ID NO: 649 - protein, 111 aa, synthetic construct
DIQMTQSPSSLSASVGDRVTITCRASKSVSTSGYSYMHWYQQKPGKAPKLLIYLASNLESGVPSRFSGSGSGTDFTFTISSLQPEDIATYYCQHIRELPYTFGGGTKVEIK

SEQ ID NO: 650 - protein, 107 aa, synthetic construct
DIQMTQSPSSVSASVGDRVTITCKASQDVSTSVAWYQQKPGKAPKLLIYSASYRYTGVPSRFSGSGSGTDFTLTISSLQPEDFATYYCQQHYNTPPTFGGGTKVEIK

SEQ ID NO: 651 - protein, 113 aa, synthetic construct
DIQMTQSPSSLSASVGDRVTITCKSSQSLLNSRNQKNYLAWYQQKPGKVPKLLIYFASTRESGVPSRFSGSGSGTDFTLTISSLQPEDVATYFCQQHYITPYTFGGGTKVEIK

SEQ ID NO: 652 - protein, 121 aa, synthetic construct
QVQLVQSGAEVKKPGASVKVSCKASGYTFTSYWMHWVRQAPGQRLEWMGNIYPGSGITHYNEKFKSRVTITRDTSASTAYMELSSLRSEDTAVYYCTRGGYGKGDWYFDVWGQGTTVTVSS

SEQ ID NO: 653 - protein, 117 aa, synthetic construct
EVQLVQSGAEVKKPGESLKISCKGSGYSFTSYPMHWVRQMPGKGLEWMGWIKMYSGVPTYADDFKGQVTISLDKSISTAYLQWSSLKASDTAMYYCARNWDKGFDYWGQGTTVTVSS

SEQ ID NO: 654 - protein, 122 aa, synthetic construct
QVQLVQSGAEVKKPGASVKVSCKASGYTFTSYGLAWVRQAPGQGLEWMGYIFPGNDYTAYNEKFQGRVTMTTDTSTSTAYMELRSLRSDDTAVYYCAREGQLGLHYYFMDYWGQGTLVTVSS

SEQ ID NO: 655 - protein, 119 aa, synthetic construct
QVQLVQSGAEVKKPGASVKVSCKASGYTFTDYYMNWVRQAPGQGLEWMGDINPYYGSSNYNQKFKGRVTMTTDKSTSTAYMELRSLRSDDTAVYYCARDSSGYVGFAYWGQGTLVTVSS

SEQ ID NO: 656 - protein, 113 aa, synthetic construct; identical to SEQ ID NO: 651

SEQ ID NO: 657 - protein, 111 aa, synthetic construct
QSALTQPASVSGSPGQSITISCTGTSSDVGGYNYVSWYQQHPGKAPKVMIYDVTNRPSGVSNRFSGSKSGNTASLTISGLQAEDEADYYCSSYTIASTLVVFGGGTKLTVL

SEQ ID NO: 658 - protein, 112 aa, synthetic construct
QSALTQPASVSGSPGQSITISCTGTSSDVGGYNYVSWYQQHPGKAPKVMIYDVTNRPSGVSNRFSGSKSGNTASLTISGLQAEDEADYYCSSYTSTSTFVVFGGGTKLTVLG

SEQ ID NO: 659 - protein, 111 aa, synthetic construct
QSALTQPASVSGSPGQSITISCTGTSSDVGGYNYVSWYQQHPGKAPKVMIYDVTNRPSGVSNRFSGSKSGNTASLTISGLQAEDEADYYCSSYTRTSTLVVFGGGTKLTVL

SEQ ID NO: 660 - protein, 120 aa, synthetic construct
QVQLQQSGGGLVKPGGSLRLSCAASGFTFSSYDMHWVRQAPGKGLEWVAVISYDGSNKYYADSVKGRFTISRDNSKNTLYLQMDSLRAEDTAVYFCAKEGDSSRWSYDLWGRGTLVTVSS

SEQ ID NO: 661 - protein, 120 aa, synthetic construct
QVQLQQSGGGLVKPGGSLRLSCAASGFTFSSYAMHWVRQAPGKGLEWVAVISYDGSNKYYADSVKGRFTISRDNSKNTLYLQMDSLRAEDTAVYYCAKEGDSSRWSYDLWGRGTLVTVSS

SEQ ID NO: 662 - protein, 120 aa, synthetic construct; identical to SEQ ID NO: 660

SEQ ID NO: 663 - protein, 108 aa, synthetic construct
DTVMTQSPASLSTSVGERVTVNCKASQHVHAAVAWFQQKPGQSPRRLIYLATSRHTGVPDRFTGSGFGRDFTLTISNVEAEDLAVYYCLQYGSIPFAFGSGTKLELIR

SEQ ID NO: 664 - protein, 108 aa, synthetic construct
DTVMTQSPASMSTSVGERVTVNCKASQHVTAVVAWFQQKPGQSPKRLIYLSTYRHTGVPNRFTGSGFGRDFTLTISNVEAEDLAVYYCLQYGSIPFTFGSGTRLEIKR

SEQ ID NO: 665 - protein, 119 aa, synthetic construct
EVQLVESGGGLVQPGRSLRVSCAASGFTFSIYGMAWVRQAPTKGLEWVASIINSGGSTYYRDSVRGRFTISRDNAKSTLYLQMDSLRSEDTATYYCTTVDGSHYFDYWGRGVMVTVSSA

SEQ ID NO: 666 - protein, 118 aa, synthetic construct
EVQLTESGGGLVPPGRSLKLSCEASGFIFSDYGMAWVRQGPTKGLEWVASITNSGGNTFYRDSVKGRFTISRDNAKRTLYLQMDSLRSEDTATYYCTTVDGSHYFDYWGQGVMVTVSS

SEQ ID NO: 667 - protein, 130 aa, synthetic construct
MHFQVQIFSFLLISASVIMSRGDIQLTQSPSSLSASVGDRVTITCTASSTVSSTYLHWYQQKPGKAPKLLIYSTSNLASGVPSRFSGSGSGTDYTLTISSLQPEDFATYYCHQYHRSPPTFGQGTKLEIK

SEQ ID NO: 668 - protein, 123 aa, synthetic construct
EVQLVQSGAEVKKPGASVKISCKASGYTFTDYYMNWVRQAPGQGLEWMGDVVPNNGVPTYNQKFKGRVTITADKSTSTAYMELRSLRSEDTAVYYCARPHYYYAGRSGAMDYWGQGTLVTVSS

SEQ ID NO: 669 - protein, 106 aa, synthetic construct
IVLTQSPAIMSASPGEKVTITCSASSSVSYLHWFQQKPGTSPKLWVYSTSNLPSGVPARFGGSGSGTSYSLTISRMEAEDAATYYCQQRSIYPPWTFGGGTKLEIK

SEQ ID NO: 670 - protein, 106 aa, synthetic construct
IVLTQSPSIMSVSPGEKVTITCSASSSVSYMHWFQQKPGTSPKLCIYSTSNLASGVPARFSGRGSGTSYSLTISRVAAEDAATYYCQQRSNYPPWTFGGGTKLEIK

SEQ ID NO: 671 - protein, 106 aa, synthetic construct
IVLTQSPAIMSASPGEKVTITCSASSSVSYMHWFQQKPGTSPKLWIYSTSNLASGVPARFSGSGSGTSYSLTISRVAAEDAATYYCQQRSTYPPWTFGGGTKLEIK

SEQ ID NO: 672 - protein, 106 aa, synthetic construct
IVLTQSPAIMSASPGEKVTITCSASSSVNYMHWFQLKPGTSPKLLIYSTSNLASGVPARFSGRGSGTSYSLTISRMEAEDAATYYCQQRNNYPPWTFGGGTKLEIK

SEQ ID NO: 673 - protein, 106 aa, synthetic construct
IVLTQSPSIMSVSPGEKVTITCSASSSVSYMHWFQQKPGTSPKLGIYSTSNLASGVPARFSGRGSGTSYSLTISRVAAEDAATYYCQQRSNYPPWTFGGGTKLEIK

SEQ ID NO: 674 - protein, 106 aa, synthetic construct
IVLTQSPSIMSVSPGEKVTITCSASSSVSYMHWFQQKPGTSPKLSIYSTSNLASGVPARFSGRGSGTSYSLTISRVAAEDAATYYCQQRSNYPPWTFGGGTKLEIK

SEQ ID NO: 675 - protein, 107 aa, synthetic construct
DIVLTQSPSIMSVSPGEKVTITCSASSSVSYMHWFQQKPGTSPKLLIYSTSNLASGVPARFSGRGSGTSYSLTISRVAAEDAATYYCQQRSNYPPWTFGGGTKLEIK

SEQ ID NO: 676 - protein, 106 aa, synthetic construct
IVLTQSPSIMSVSPGEKVTITCSASSSVSYMHWFQQKPGTSPKLLIYSTSNLASGVPARFSGRGSGTSYSLTISRVAAEDAATYYCQQRSNYPPWTFGGGTKLEIK

SEQ ID NO: 677 - protein, 106 aa, synthetic construct
IVLTQSPSIMSVSPGEKVTITCSASSSVSYMHWFQQKPGTSPKLWIYSTSNLASGVPARFSGRGSGTSYSLTISRVAAEDAATYYCQQRSNYPPWTFGGGTKLEIK

SEQ ID NO: 678 - protein, 106 aa, synthetic construct; identical to SEQ ID NO: 674

SEQ ID NO: 679 - protein, 117 aa, synthetic construct
EVQLQQSGPELVKPGASMKISCKASGYSFTGYTMNWVKQSHGKNLEWIGLINPYNGGTSYNQKFKGKATLTIDKSSSTAYMELLSLTSEDSAVYYCARDYGYVLDYWGQGTTLTVSS

SEQ ID NO: 680 - protein, 117 aa, synthetic construct; identical to SEQ ID NO: 88

SEQ ID NO: 681 - protein, 117 aa, synthetic construct
EVQLQQSGPELVKPGASMKISCKASGYSFTGYTMNWVKQSHGKNLEWIGLINPYNGGIIYNQKFKGKATLTVDKSSSTAYMELLSLTSEDSAVFYCARDFGYVLDYWGQGTTLTVSS

SEQ ID NO: 682 - protein, 117 aa, synthetic construct
EVQLQQSRPELVKPGASMKISCKASGYSFTGYTLNWVKQSHGKNLEWIGLINPYNGGSSYNQKFKDKATLTVDKSSSTAYMELLSLTSEDSAVYYCARDYGYVFDYWGQGTTLTVSS

SEQ ID NO: 683 - protein, 791 aa, synthetic construct
MALPVTALLLPLALLLHAARPDYKDDDDKGGGGSGGGGSSRSVALAVLALLSLSGLEAVMAPRTLFLGGGGSGGGGSGGGGSIQRTPKIQVYSRHPAENGKSNFLNCYVSGFHPSDIEVDLLKNGERIEKVEHSDLSFSKDWSFYLLYYTEFTPTEKDEYACRVNHVTLSQPKIVKWDRDMGGGGSGGGGSGGGGSGGGGSGSMHVLRYGYTGIFDDTSHMTLTVVGIFDGQHFFTYHVNSSDKASSRANGTISWMANVSAAYPTYLDGERAKGDLIFNQTEQNLLELEIALGYRSQSVLTWTHECNTTENGSFVAGYEGFGWDGETLMELKDNLTLWTGPNYEISWLKQNKTYIDGKIKNISEGDTTIQRNYLKGNCTQWSVIYSGFQTPVTHPVVKGGVRNQNDNRAEAFCTSYGFFPGEINITFIHYGNKAPDDSEPQCNPLLPTFDGTFHQGCYVAIFCNQNYTCRVTHGNWTVEIPISVTSPDDSSSGEVPDHPTANKRYNTMTISSVLLALLLCALLFAFLHYFTTLKQYLRNLAFAWRYRKVRSSMVSKGEELFTGVVPILVELDGDVNGHKFSVSGEGEGDATYGKLTLKFICTTGKLPVPWPTLVTTLTYGVQCFSRYPDHMKQHDFFKSAMPEGYVQERTIFFKDDGNYKTRAEVKFEGDTLVNRIELKGIDFKEDGNILGHKLEYNYNSHNVYIMADKQKNGIKVNFKIRHNIEDGSVQLADHYQQNTPIGDGPVLLPDNHYLSTQSALSKDPNEKRDHMVLLEFVTAAGITLGMDELYK

SEQ ID NO: 684 - DNA, 2931 bp, synthetic construct
  source 1..2931: mol_type = other DNA
atggcactccccgtaactgctctgctgctgccgttggcattgctcctgcacgccgcacgcccggactacaaagacgatgacgataaaggcggtggtggctctggtggtggcggatcctctcgctccgtggccttagctgtgctcgcgctactctctcttagcggcctcgaagctgttatggctccgcggactttattcttaggtggtggcggatccggtggtggcggttctggtggtggcggctccatccagcgtacgcccaaaattcaagtctacagccgacatcctgcagagaacggcaaatctaatttcctgaactgctatgtatcaggctttcaccctagcgatatagaagtggacctgctgaaaaacggagagaggatagaaaaggtcgaacacagcgacctctccttttccaaggactggagcttttatcttctgtattatactgaatttacacccacggaaaaagatgagtatgcgtgccgagtaaaccacgtcacgctgtcacagcccaaaatagtaaaatgggatcgcgacatgggtggtggcggttctggtggtggcggtagtggcggcggaggaagcggtggtggcggttccggatctatgcacgtgctgagatacggatataccggcatcttcgacgatacatcccatatgactctgaccgtggtcgggatttttgacggacagcacttctttacataccatgtgaacagctccgataaggcttctagtcgagcaaatggcaccatctcatggatggccaacgtgagcgcagcctaccccacatatctggacggagaacgcgctaaaggcgatctgatcttcaatcagaccgagcagaacctgctggagctggaaattgctctggggtacaggtctcagagtgtcctgacatggactcacgaatgtaataccacagagaacgggagcttcgtggcaggatatgagggctttgggtgggacggagaaacactgatggagctgaaggataatctgactctgtggaccggccctaactacgaaatcagctggctgaagcagaacaagacttacatcgacggaaagatcaaaaacatcagcgagggcgatactaccatccagcgcaattacctgaagggcaactgcacccagtggagcgtgatctactctgggttccagacacctgtcactcacccagtggtcaaagggggagtgcgaaaccagaatgacaaccgggccgaggccttctgtacatcctacggcttctttcccggggagatcaatattacttttatccattacggcaacaaggcccccgacgattctgagcctcagtgcaatcccctgctgcctaccttcgatggcacatttcaccaggggtgctacgtcgctatcttctgcaatcagaactatacttgccgggtgacccatgggaactggactgtggaaatcccaatttcagtcaccagccccgacgattcaagctccggagaggtgccagatcaccccaccgcaaataagagatacaacaccatgacaatctctagtgtgctgctggccctgctgctgtgcgcactgctgttcgcttttctgcattacttcacaactctgaagcagtatctgcggaacctggcatttgcctggcggtacagaaaagtgagatcaagctgaacgttactggccgaagccgcttggaataaggccggtgtgcgtttgtctatatgttattttccaccatattgccgtcttttggcaatgtgagggcccggaaacctggccctgtcttcttgacgagcattcctaggggtctttcccctctcgccaaaggaatgcaaggtctgttgaatgtcgtgaaggaagcagttcctctggaagcttcttgaagacaaacaacgtctgtagcgaccctttgcaggcagcggaaccccccacctggcgacaggtgcctctgcggccaaaagccacgtgtataagatacacctgcaaaggcggcacaaccccagtgccacgttgtgagttggatagttgtggaaagagtcaaatggctctcctcaagcgtattcaacaaggggctgaaggatgcccagaaggtaccccattgtatgggatctgatctggggcctcggtgcacatgctttacatgtgtttagtcgaggttaaaaaaacgtctaggccccccgaaccacggggacgtggttttcctttgaaaaacacgataataccatggtgagcaagggcgaggagctgttcaccggggtggtgcccatcctggtcgagctggacggcgacgtaaacggccacaagttcagcgtgtccggcgagggcgagggcgatgccacctacggcaagctgaccctgaagttcatctgcaccaccggcaagctgcccgtgccctggcccaccctcgtgaccaccctgacctacggcgtgcagtgcttcagccgctaccccgaccacatgaagcagcacgacttcttcaagtccgccatgcccgaaggctacgtccaggagcgcaccatcttcttcaaggacgacggcaactacaagacccgcgccgaggtgaagttcgagggcgacaccctggtgaaccgcatcgagctgaagggcatcgacttcaaggaggacggcaacatcctggggcacaagctggagtacaactacaacagccacaacgtctatatcatggccgacaagcagaagaacggcatcaaggtgaacttcaagatccgccacaacatcgaggacggcagcgtgcagctcgccgaccactaccagcagaacacccccatcggcgacggccccgtgctgctgcccgacaaccactacctgagcacccagtccgccctgagcaaagaccccaacgagaagcgcgatcacatggtcctgctggagttcgtgaccgccgccgggatcactctcggcatggacgagctgtacaagtaa

SEQ ID NO: 685 - protein, 514 aa, synthetic construct
MSRSVALAVLALLSLSGLEAVMAPRTLFLGGGGSGGGGSGGGGSIQRTPKIQVYSRHPAENGKSNFLNCYVSGFHPSDIEVDLLKNGERIEKVEHSDLSFSKDWSFYLLYYTEFTPTEKDEYACRVNHVTLSQPKIVKWDRDMGGGGSGGGGSGGGGSGGGGSGSMHVLRYGYTGIFDDTSHMTLTVVGIFDGQHFFTYHVNSSDKASSRANGTISWMANVSAAYPTYLDGERAKGDLIFNQTEQNLLELEIALGYRSQSVLTWTHECNTTENGSFVAGYEGFGWDGETLMELKDNLTLWTGPNYEISWLKQNKTYIDGKIKNISEGDTTIQRNYLKGNCTQWSVIYSGFQTPVTHPVVKGGVRNQNDNRAEAFCTSYGFFPGEINITFIHYGNKAPDDSEPQCNPLLPTFDGTFHQGCYVAIFCNQNYTCRVTHGNWTVEIPISVTSPDDSSSGEVPDHPTANKRYNTMTISSVLLALLLCALLFAFLHYFTTLKQYLRNLAFAWRYRKVRSS

SEQ ID NO: 686 - DNA, 1545 bp, synthetic construct
  source 1..1545: mol_type = other DNA
atgtctcgctccgtggccttagctgtgctcgcgctactctctcttagcggcctcgaagctgttatggctccgcggactttattcttaggtggtggcggatccggtggtggcggttctggtggtggcggctccatccagcgtacgcccaaaattcaagtctacagccgacatcctgcagagaacggcaaatctaatttcctgaactgctatgtatcaggctttcaccctagcgatatagaagtggacctgctgaaaaacggagagaggatagaaaaggtcgaacacagcgacctctccttttccaaggactggagcttttatcttctgtattatactgaatttacacccacggaaaaagatgagtatgcgtgccgagtaaaccacgtcacgctgtcacagcccaaaatagtaaaatgggatcgcgacatgggtggtggcggttctggtggtggcggtagtggcggcggaggaagcggtggtggcggttccggatctatgcacgtgctgagatacggatataccggcatcttcgacgatacatcccatatgactctgaccgtggtcgggatttttgacggacagcacttctttacataccatgtgaacagctccgataaggcttctagtcgagcaaatggcaccatctcatggatggccaacgtgagcgcagcctaccccacatatctggacggagaacgcgctaaaggcgatctgatcttcaatcagaccgagcagaacctgctggagctggaaattgctctggggtacaggtctcagagtgtcctgacatggactcacgaatgtaataccacagagaacgggagcttcgtggcaggatatgagggctttgggtgggacggagaaacactgatggagctgaaggataatctgactctgtggaccggccctaactacgaaatcagctggctgaagcagaacaagacttacatcgacggaaagatcaaaaacatcagcgagggcgatactaccatccagcgcaattacctgaagggcaactgcacccagtggagcgtgatctactctgggttccagacacctgtcactcacccagtggtcaaagggggagtgcgaaaccagaatgacaaccgggccgaggccttctgtacatcctacggcttctttcccggggagatcaatattacttttatccattacggcaacaaggcccccgacgattctgagcctcagtgcaatcccctgctgcctaccttcgatggcacatttcaccaggggtgctacgtcgctatcttctgcaatcagaactatacttgccgggtgacccatgggaactggactgtggaaatcccaatttcagtcaccagccccgacgattcaagctccggagaggtgccagatcaccccaccgcaaataagagatacaacaccatgacaatctctagtgtgctgctggccctgctgctgtgcgcactgctgttcgcttttctgcattacttcacaactctgaagcagtatctgcggaacctggcatttgcctggcggtacagaaaagtgagatcaagctga

SEQ ID NO: 687 - protein, 777 aa, synthetic construct
MALPVTALLLPLALLLHAARPDYKDDDDKGGGGSGGGGSSRSVALAVLALLSLSGLEAVMAPRTLFLGGGGSGGGGSGGGGSIQRTPKIQVYSRHPAENGKSNFLNCYVSGFHPSDIEVDLLKNGERIEKVEHSDLSFSKDWSFYLLYYTEFTPTEKDEYACRVNHVTLSQPKIVKWDRDMGGGGSGGGGSGGGGSGGGGSGSHSLKYFHTSVSRPGRGEPRFISVGYVDDTQFVRFDNDAASPRMVPRAPWMEQEGSEYWDRETRSARDTAQIFRVNLRTLRGYYNQSEAGSHTLQWMHGCELGPDRRFLRGYEQFAYDGKDYLTLNEDLRSWTAVDTAAQISEQKSNDASEAEHQRAYLEDTCVEWLHKYLEKGKETLLHLEPPKTHVTHHPISDHEATLRCWALGFYPAEITLTWQQDGEGHTQDTELVETRPAGDGTFQKWAAVVVPSGEEQRYTCHVQHEGLPEPVTLRWKPASQPTIPIVGIIAGLVLLGSVVSGAVVAAVIWRKKSSGGKGGSYYKAEWSDSAQGSESHSLMVSKGEELFTGVVPILVELDGDVNGHKFSVSGEGEGDATYGKLTLKFICTTGKLPVPWPTLVTTLTYGVQCFSRYPDHMKQHDFFKSAMPEGYVQERTIFFKDDGNYKTRAEVKFEGDTLVNRIELKGIDFKEDGNILGHKLEYNYNSHNVYIMADKQKNGIKVNFKIRHNIEDGSVQLADHYQQNTPIGDGPVLLPDNHYLSTQSALSKDPNEKRDHMVLLEFVTAAGITLGMDELYK

SEQ ID NO: 688 - DNA, 2889 bp, synthetic construct
  source 1..2889: mol_type = other DNA
atggcactccccgtaactgctctgctgctgccgttggcattgctcctgcacgccgcacgcccggactacaaagacgatgacgataaaggcggtggtggctctggtggtggcggatcctctcgctccgtggccttagctgtgctcgcgctactctctcttagcggcctcgaagctgttatggctccgcggactttattcttaggtggtggcggatccggtggtggcggttctggtggtggcggctccatccagcgtacgcccaaaattcaagtctacagccgacatcctgcagagaacggcaaatctaatttcctgaactgctatgtatcaggctttcaccctagcgatatagaagtggacctgctgaaaaacggagagaggatagaaaaggtcgaacacagcgacctctccttttccaaggactggagcttttatcttctgtattatactgaatttacacccacggaaaaagatgagtatgcgtgccgagtaaaccacgtcacgctgtcacagcccaaaatagtaaaatgggatcgcgacatgggtggtggcggttctggtggtggcggtagtggcggcggaggaagcggtggtggcggttccggatctcactccttgaagtatttccacacttccgtgtcccggcccggccgcggggagccccgcttcatctctgtgggctacgtggacgacacccagttcgtgcgcttcgacaacgacgccgcgagtccgaggatggtgccgcgggcgccgtggatggagcaggaggggtcagagtattgggaccgggagacacggagcgccagggacaccgcacagattttccgagtgaacctgcggacgctgcgcggctactacaatcagagcgaggccgggtctcacaccctgcagtggatgcatggctgcgagctggggcccgacaggcgcttcctccgcgggtatgaacagttcgcctacgacggcaaggattatctcaccctgaatgaggacctgcgctcctggaccgcggtggacacggcggctcagatctccgagcaaaagtcaaatgatgcctctgaggcggagcaccagagagcctacctggaagacacatgcgtggagtggctccacaaatacctggagaaggggaaggagacgctgcttcacctggagcccccaaagacacacgtgactcaccaccccatctctgaccatgaggccaccctgaggtgctgggctctgggcttctaccctgcggagatcacactgacctggcagcaggatggggagggccatacccaggacacggagctcgtggagaccaggcctgcaggggatggaaccttccagaagtgggcagctgtggtggtgccttctggagaggagcagagatacacgtgccatgtgcagcatgaggggctacccgagcccgtcaccctgagatggaagccggcttcccagcccaccatccccatcgtgggcatcattgctggcctggttctccttggatctgtggtctctggagctgtggttgctgctgtgatatggaggaagaagagctcaggtggaaaaggagggagctactataaggctgagtggagcgacagtgcccaggggtctgagtctcacagcttgtaaacgttactggccgaagccgcttggaataaggccggtgtgcgtttgtctatatgttattttccaccatattgccgtcttttggcaatgtgagggcccggaaacctggccctgtcttcttgacgagcattcctaggggtctttcccctctcgccaaaggaatgcaaggtctgttgaatgtcgtgaaggaagcagttcctctggaagcttcttgaagacaaacaacgtctgtagcgaccctttgcaggcagcggaaccccccacctggcgacaggtgcctctgcggccaaaagccacgtgtataagatacacctgcaaaggcggcacaaccccagtgccacgttgtgagttggatagttgtggaaagagtcaaatggctctcctcaagcgtattcaacaaggggctgaaggatgcccagaaggtaccccattgtatgggatctgatctggggcctcggtgcacatgctttacatgtgtttagtcgaggttaaaaaaacgtctaggccccccgaaccacggggacgtggttttcctttgaaaaacacgataataccatggtgagcaagggcgaggagctgttcaccggggtggtgcccatcctggtcgagctggacggcgacgtaaacggccacaagttcagcgtgtccggcgagggcgagggcgatgccacctacggcaagctgaccctgaagttcatctgcaccaccggcaagctgcccgtgccctggcccaccctcgtgaccaccctgacctacggcgtgcagtgcttcagccgctaccccgaccacatgaagcagcacgacttcttcaagtccgccatgcccgaaggctacgtccaggagcgcaccatcttcttcaaggacgacggcaactacaagacccgcgccgaggtgaagttcgagggcgacaccctggtgaaccgcatcgagctgaagggcatcgacttcaaggaggacggcaacatcctggggcacaagctggagtacaactacaacagccacaacgtctatatcatggccgacaagcagaagaacggcatcaaggtgaacttcaagatccgccacaacatcgaggacggcagcgtgcagctcgccgaccactaccagcagaacacccccatcggcgacggccccgtgctgctgcccgacaaccactacctgagcacccagtccgccctgagcaaagaccccaacgagaagcgcgatcacatggtcctgctggagttcgtgaccgccgccgggatcactctcggcatggacgagctgtacaagtaa

SEQ ID NO: 689 - protein, 500 aa, synthetic construct
MSRSVALAVLALLSLSGLEAVMAPRTLFLGGGGSGGGGSGGGGSIQRTPKIQVYSRHPAENGKSNFLNCYVSGFHPSDIEVDLLKNGERIEKVEHSDLSFSKDWSFYLLYYTEFTPTEKDEYACRVNHVTLSQPKIVKWDRDMGGGGSGGGGSGGGGSGGGGSGSHSLKYFHTSVSRPGRGEPRFISVGYVDDTQFVRFDNDAASPRMVPRAPWMEQEGSEYWDRETRSARDTAQIFRVNLRTLRGYYNQSEAGSHTLQWMHGCELGPDRRFLRGYEQFAYDGKDYLTLNEDLRSWTAVDTAAQISEQKSNDASEAEHQRAYLEDTCVEWLHKYLEKGKETLLHLEPPKTHVTHHPISDHEATLRCWALGFYPAEITLTWQQDGEGHTQDTELVETRPAGDGTFQKWAAVVVPSGEEQRYTCHVQHEGLPEPVTLRWKPASQPTIPIVGIIAGLVLLGSVVSGAVVAAVIWRKKSSGGKGGSYYKAEWSDSAQGSESHSL

SEQ ID NO: 690 - DNA, 1503 bp, synthetic construct
  source 1..1503: mol_type = other DNA
atgtctcgctccgtggccttagctgtgctcgcgctactctctcttagcggcctcgaagctgttatggctccgcggactttattcttaggtggtggcggatccggtggtggcggttctggtggtggcggctccatccagcgtacgcccaaaattcaagtctacagccgacatcctgcagagaacggcaaatctaatttcctgaactgctatgtatcaggctttcaccctagcgatatagaagtggacctgctgaaaaacggagagaggatagaaaaggtcgaacacagcgacctctccttttccaaggactggagcttttatcttctgtattatactgaatttacacccacggaaaaagatgagtatgcgtgccgagtaaaccacgtcacgctgtcacagcccaaaatagtaaaatgggatcgcgacatgggtggtggcggttctggtggtggcggtagtggcggcggaggaagcggtggtggcggttccggatctcactccttgaagtatttccacacttccgtgtcccggcccggccgcggggagccccgcttcatctctgtgggctacgtggacgacacccagttcgtgcgcttcgacaacgacgccgcgagtccgaggatggtgccgcgggcgccgtggatggagcaggaggggtcagagtattgggaccgggagacacggagcgccagggacaccgcacagattttccgagtgaacctgcggacgctgcgcggctactacaatcagagcgaggccgggtctcacaccctgcagtggatgcatggctgcgagctggggcccgacaggcgcttcctccgcgggtatgaacagttcgcctacgacggcaaggattatctcaccctgaatgaggacctgcgctcctggaccgcggtggacacggcggctcagatctccgagcaaaagtcaaatgatgcctctgaggcggagcaccagagagcctacctggaagacacatgcgtggagtggctccacaaatacctggagaaggggaaggagacgctgcttcacctggagcccccaaagacacacgtgactcaccaccccatctctgaccatgaggccaccctgaggtgctgggctctgggcttctaccctgcggagatcacactgacctggcagcaggatggggagggccatacccaggacacggagctcgtggagaccaggcctgcaggggatggaaccttccagaagtgggcagctgtggtggtgccttctggagaggagcagagatacacgtgccatgtgcagcatgaggggctacccgagcccgtcaccctgagatggaagccggcttcccagcccaccatccccatcgtgggcatcattgctggcctggttctccttggatctgtggtctctggagctgtggttgctgctgtgatatggaggaagaagagctcaggtggaaaaggagggagctactataaggctgagtggagcgacagtgcccaggggtctgagtctcacagcttgtaa

SEQ ID NO: 691 - protein, 364 aa, synthetic construct
MALPVTALLLPLALLLHAARPDYKDDDDKGGGGSGGGGSLQNRRGLDLLFLKEGGLTTTPAPRPPTPAPTIASQPLSLRPEACRPAAGGAVHTRGLDFACDIYIWAPLAGTCGVLLLSLVITLYCMVSKGEELFTGVVPILVELDGDVNGHKFSVSGEGEGDATYGKLTLKFICTTGKLPVPWPTLVTTLTYGVQCFSRYPDHMKQHDFFKSAMPEGYVQERTIFFKDDGNYKTRAEVKFEGDTLVNRIELKGIDFKEDGNILGHKLEYNYNSHNVYIMADKQKNGIKVNFKIRHNIEDGSVQLADHYQQNTPIGDGPVLLPDNHYLSTQSALSKDPNEKRDHMVLLEFVTAAGITLGMDELYK

SEQ ID NO: 692 - DNA, 1653 bp, synthetic construct
  source 1..1653: mol_type = other DNA
atggcactccccgtaactgctctgctgctgccgttggcattgctcctgcacgccgcacgcccggactacaaagacgatgacgataaaggcggtggtggctctggtggtggcggatccctgcaaaacagaaggggattagacctgctttttcttaaagagggagggctcaccacgacgccagcgccgcgaccaccaacaccggcgcccaccatcgcgtcgcagcccctgtccctgcgcccagaggcgtgccggccagcggcggggggcgcagtgcacacgagggggctggacttcgcctgtgatatctacatctgggcgcccttggccgggacttgtggggtccttctcctgtcactggttatcaccctttactgctgataaacgttactggccgaagccgcttggaataaggccggtgtgcgtttgtctatatgttattttccaccatattgccgtcttttggcaatgtgagggcccggaaacctggccctgtcttcttgacgagcattcctaggggtctttcccctctcgccaaaggaatgcaaggtctgttgaatgtcgtgaaggaagcagttcctctggaagcttcttgaagacaaacaacgtctgtagcgaccctttgcaggcagcggaaccccccacctggcgacaggtgcctctgcggccaaaagccacgtgtataagatacacctgcaaaggcggcacaaccccagtgccacgttgtgagttggatagttgtggaaagagtcaaatggctctcctcaagcgtattcaacaaggggctgaaggatgcccagaaggtaccccattgtatgggatctgatctggggcctcggtgcacatgctttacatgtgtttagtcgaggttaaaaaaacgtctaggccccccgaaccacggggacgtggttttcctttgaaaaacacgataataccatggtgagcaagggcgaggagctgttcaccggggtggtgcccatcctggtcgagctggacggcgacgtaaacggccacaagttcagcgtgtccggcgagggcgagggcgatgccacctacggcaagctgaccctgaagttcatctgcaccaccggcaagctgcccgtgccctggcccaccctcgtgaccaccctgacctacggcgtgcagtgcttcagccgctaccccgaccacatgaagcagcacgacttcttcaagtccgccatgcccgaaggctacgtccaggagcgcaccatcttcttcaaggacgacggcaactacaagacccgcgccgaggtgaagttcgagggcgacaccctggtgaaccgcatcgagctgaagggcatcgacttcaaggaggacggcaacatcctggggcacaagctggagtacaactacaacagccacaacgtctatatcatggccgacaagcagaagaacggcatcaaggtgaacttcaagatccgccacaacatcgaggacggcagcgtgcagctcgccgaccactaccagcagaacacccccatcggcgacggccccgtgctgctgcccgacaaccactacctgagcacccagtccgccctgagcaaagaccccaacgagaagcgcgatcacatggtcctgctggagttcgtgaccgccgccgggatcactctcggcatggacgagctgtacaagtaa

SEQ ID NO: 693 - protein, 107 aa, synthetic construct; identical to SEQ ID NO: 218

SEQ ID NO: 694 - DNA, 327 bp, synthetic construct
  source 1..327: mol_type = other DNA
atggcactccccgtaactgctctgctgctgccgttggcattgctcctgcacgccgcacgcccgctgcaaaacagaaggggattagacctgctttttcttaaagagggagggctcaccacgacgccagcgccgcgaccaccaacaccggcgcccaccatcgcgtcgcagcccctgtccctgcgcccagaggcgtgccggccagcggcggggggcgcagtgcacacgagggggctggacttcgcctgtgatatctacatctgggcgcccttggccgggacttgtggggtccttctcctgtcactggttatcaccctttactgctgataa

SEQ ID NO: 695 - protein, 375 aa, synthetic construct
MALPVTALLLPLALLLHAARPDYKDDDDKGGGGSGGGGSLQNRRGLDLLFLKEGGLCAALKEECCFYTTTPAPRPPTPAPTIASQPLSLRPEACRPAAGGAVHTRGLDFACDIYIWAPLAGTCGVLLLSLVITLYCMVSKGEELFTGVVPILVELDGDVNGHKFSVSGEGEGDATYGKLTLKFICTTGKLPVPWPTLVTTLTYGVQCFSRYPDHMKQHDFFKSAMPEGYVQERTIFFKDDGNYKTRAEVKFEGDTLVNRIELKGIDFKEDGNILGHKLEYNYNSHNVYIMADKQKNGIKVNFKIRHNIEDGSVQLADHYQQNTPIGDGPVLLPDNHYLSTQSALSKDPNEKRDHMVLLEFVTAAGITLGMDELYK

SEQ ID NO: 696 - DNA, 1686 bp, synthetic construct
  source 1..1686: mol_type = other DNA
atggcactccccgtaactgctctgctgctgccgttggcattgctcctgcacgccgcacgcccggactacaaagacgatgacgataaaggcggtggtggctctggtggtggcggatccctgcaaaacagaaggggattagacctgctttttcttaaagagggagggctctgtgctgccttaaaggaagaatgttgcttttataccacgacgccagcgccgcgaccaccaacaccggcgcccaccatcgcgtcgcagcccctgtccctgcgcccagaggcgtgccggccagcggcggggggcgcagtgcacacgagggggctggacttcgcctgtgatatctacatctgggcgcccttggccgggacttgtggggtccttctcctgtcactggttatcaccctttactgctgataaacgttactggccgaagccgcttggaataaggccggtgtgcgtttgtctatatgttattttccaccatattgccgtcttttggcaatgtgagggcccggaaacctggccctgtcttcttgacgagcattcctaggggtctttcccctctcgccaaaggaatgcaaggtctgttgaatgtcgtgaaggaagcagttcctctggaagcttcttgaagacaaacaacgtctgtagcgaccctttgcaggcagcggaaccccccacctggcgacaggtgcctctgcggccaaaagccacgtgtataagatacacctgcaaaggcggcacaaccccagtgccacgttgtgagttggatagttgtggaaagagtcaaatggctctcctcaagcgtattcaacaaggggctgaaggatgcccagaaggtaccccattgtatgggatctgatctggggcctcggtgcacatgctttacatgtgtttagtcgaggttaaaaaaacgtctaggccccccgaaccacggggacgtggttttcctttgaaaaacacgataataccatggtgagcaagggcgaggagctgttcaccggggtggtgcccatcctggtcgagctggacggcgacgtaaacggccacaagttcagcgtgtccggcgagggcgagggcgatgccacctacggcaagctgaccctgaagttcatctgcaccaccggcaagctgcccgtgccctggcccaccctcgtgaccaccctgacctacggcgtgcagtgcttcagccgctaccccgaccacatgaagcagcacgacttcttcaagtccgccatgcccgaaggctacgtccaggagcgcaccatcttcttcaaggacgacggcaactacaagacccgcgccgaggtgaagttcgagggcgacaccctggtgaaccgcatcgagctgaagggcatcgacttcaaggaggacggcaacatcctggggcacaagctggagtacaactacaacagccacaacgtctatatcatggccgacaagcagaagaacggcatcaaggtgaacttcaagatccgccacaacatcgaggacggcagcgtgcagctcgccgaccactaccagcagaacacccccatcggcgacggccccgtgctgctgcccgacaaccactacctgagcacccagtccgccctgagcaaagaccccaacgagaagcgcgatcacatggtcctgctggagttcgtgaccgccgccgggatcactctcggcatggacgagctgtacaagtaa

SEQ ID NO: 697 - protein, 118 aa, synthetic construct
MALPVTALLLPLALLLHAARPLQNRRGLDLLFLKEGGLCAALKEECCFYTTTPAPRPPTPAPTIASQPLSLRPEACRPAAGGAVHTRGLDFACDIYIWAPLAGTCGVLLLSLVITLYC

SEQ ID NO: 698 - DNA, 360 bp, synthetic construct
  source 1..360: mol_type = other DNA
atggcactccccgtaactgctctgctgctgccgttggcattgctcctgcacgccgcacgcccgctgcaaaacagaaggggattagacctgctttttcttaaagagggagggctctgtgctgccttaaaggaagaatgttgcttttataccacgacgccagcgccgcgaccaccaacaccggcgcccaccatcgcgtcgcagcccctgtccctgcgcccagaggcgtgccggccagcggcggggggcgcagtgcacacgagggggctggacttcgcctgtgatatctacatctgggcgcccttggccgggacttgtggggtccttctcctgtcactggttatcaccctttactgctgataa

SEQ ID NO: 699 - protein, 375 aa, synthetic construct
MALPVTALLLPLALLLHAARPDYKDDDDKGGGGSGGGGSAQNRRGLDLLFWEQGGLCKALQEQCRFPTTTPAPRPPTPAPTIASQPLSLRPEACRPAAGGAVHTRGLDFACDIYIWAPLAGTCGVLLLSLVITLYCMVSKGEELFTGVVPILVELDGDVNGHKFSVSGEGEGDATYGKLTLKFICTTGKLPVPWPTLVTTLTYGVQCFSRYPDHMKQHDFFKSAMPEGYVQERTIFFKDDGNYKTRAEVKFEGDTLVNRIELKGIDFKEDGNILGHKLEYNYNSHNVYIMADKQKNGIKVNFKIRHNIEDGSVQLADHYQQNTPIGDGPVLLPDNHYLSTQSALSKDPNEKRDHMVLLEFVTAAGITLGMDELYK

SEQ ID NO: 700 - DNA, 1686 bp, synthetic construct
  source 1..1686: mol_type = other DNA
atggcactccccgtaactgctctgctgctgccgttggcattgctcctgcacgccgcacgcccggactacaaagacgatgacgataaaggcggtggtggctctggtggtggcggatccgcccagaacagacgaggccttgatctcctattctgggagcaaggaggattatgcaaagcattacaagaacagtgccgttttccgaccacgacgccagcgccgcgaccaccaacaccggcgcccaccatcgcgtcgcagcccctgtccctgcgcccagaggcgtgccggccagcggcggggggcgcagtgcacacgagggggctggacttcgcctgtgatatctacatctgggcgcccttggccgggacttgtggggtccttctcctgtcactggttatcaccctttactgctgataaacgttactggccgaagccgcttggaataaggccggtgtgcgtttgtctatatgttattttccaccatattgccgtcttttggcaatgtgagggcccggaaacctggccctgtcttcttgacgagcattcctaggggtctttcccctctcgccaaaggaatgcaaggtctgttgaatgtcgtgaaggaagcagttcctctggaagcttcttgaagacaaacaacgtctgtagcgaccctttgcaggcagcggaaccccccacctggcgacaggtgcctctgcggccaaaagccacgtgtataagatacacctgcaaaggcggcacaaccccagtgccacgttgtgagttggatagttgtggaaagagtcaaatggctctcctcaagcgtattcaacaaggggctgaaggatgcccagaaggtaccccattgtatgggatctgatctggggcctcggtgcacatgctttacatgtgtttagtcgaggttaaaaaaacgtctaggccccccgaaccacggggacgtggttttcctttgaaaaacacgataataccatggtgagcaagggcgaggagctgttcaccggggtggtgcccatcctggtcgagctggacggcgacgtaaacggccacaagttcagcgtgtccggcgagggcgagggcgatgccacctacggcaagctgaccctgaagttcatctgcaccaccggcaagctgcccgtgccctggcccaccctcgtgaccaccctgacctacggcgtgcagtgcttcagccgctaccccgaccacatgaagcagcacgacttcttcaagtccgccatgcccgaaggctacgtccaggagcgcaccatcttcttcaaggacgacggcaactacaagacccgcgccgaggtgaagttcgagggcgacaccctggtgaaccgcatcgagctgaagggcatcgacttcaaggaggacggcaacatcctggggcacaagctggagtacaactacaacagccacaacgtctatatcatggccgacaagcagaagaacggcatcaaggtgaacttcaagatccgccacaacatcgaggacggcagcgtgcagctcgccgaccactaccagcagaacacccccatcggcgacggccccgtgctgctgcccgacaaccactacctgagcacccagtccgccctgagcaaagaccccaacgagaagcgcgatcacatggtcctgctggagttcgtgaccgccgccgggatcactctcggcatggacgagctgtacaagtaa

SEQ ID NO: 701 - protein, 118 aa, synthetic construct
MALPVTALLLPLALLLHAARPAQNRRGLDLLFWEQGGLCKALQEQCRFPTTTPAPRPPTPAPTIASQPLSLRPEACRPAAGGAVHTRGLDFACDIYIWAPLAGTCGVLLLSLVITLYC

SEQ ID NO: 702 - DNA, 360 bp, synthetic construct
  source 1..360: mol_type = other DNA
atggcactccccgtaactgctctgctgctgccgttggcattgctcctgcacgccgcacgcccggcccagaacagacgaggccttgatctcctattctgggagcaaggaggattatgcaaagcattacaagaacagtgccgttttccgaccacgacgccagcgccgcgaccaccaacaccggcgcccaccatcgcgtcgcagcccctgtccctgcgcccagaggcgtgccggccagcggcggggggcgcagtgcacacgagggggctggacttcgcctgtgatatctacatctgggcgcccttggccgggacttgtggggtccttctcctgtcactggttatcaccctttactgctgataa

SEQ ID NO: 703 - protein, 422 aa, synthetic construct
MALPVTALLLPLALLLHAARPDYKDDDDKGGGGSGGGGSGALFLGFLGAAGSTMGAASVTLTVQARLLLSGIVQQQNNLLRAIEAQQHLLQLTVWGIKQLQARVLAVERYLRDQTTTPAPRPPTPAPTIASQPLSLRPEACRPAAGGAVHTRGLDFACDIYIWAPLAGTCGVLLLSLVITLYCMVSKGEELFTGVVPILVELDGDVNGHKFSVSGEGEGDATYGKLTLKFICTTGKLPVPWPTLVTTLTYGVQCFSRYPDHMKQHDFFKSAMPEGYVQERTIFFKDDGNYKTRAEVKFEGDTLVNRIELKGIDFKEDGNILGHKLEYNYNSHNVYIMADKQKNGIKVNFKIRHNIEDGSVQLADHYQQNTPIGDGPVLLPDNHYLSTQSALSKDPNEKRDHMVLLEFVTAAGITLGMDELYK

SEQ ID NO: 704 - DNA, 1827 bp, synthetic construct
  source 1..1827: mol_type = other DNA
atggcactccccgtaactgctctgctgctgccgttggcattgctcctgcacgccgcacgcccggactacaaagacgatgacgataaaggcggtggtggctctggtggtggcggatccggagctttgttccttgggttcttgggagcagcaggaagcactatgggcgcagcgtcagtaacgctgacggtacaggccagactattattgtctggtatagtgcaacagcaaaacaatttgctgagggctattgaggcgcaacagcatctgttgcaactcacagtctggggcatcaaacagctccaggcaagagtcctggctgtggaaagatacctaagggatcaaaccacgacgccagcgccgcgaccaccaacaccggcgcccaccatcgcgtcgcagcccctgtccctgcgcccagaggcgtgccggccagcggcggggggcgcagtgcacacgagggggctggacttcgcctgtgatatctacatctgggcgcccttggccgggacttgtggggtccttctcctgtcactggttatcaccctttactgctgataaacgttactggccgaagccgcttggaataaggccggtgtgcgtttgtctatatgttattttccaccatattgccgtcttttggcaatgtgagggcccggaaacctggccctgtcttcttgacgagcattcctaggggtctttcccctctcgccaaaggaatgcaaggtctgttgaatgtcgtgaaggaagcagttcctctggaagcttcttgaagacaaacaacgtctgtagcgaccctttgcaggcagcggaaccccccacctggcgacaggtgcctctgcggccaaaagccacgtgtataagatacacctgcaaaggcggcacaaccccagtgccacgttgtgagttggatagttgtggaaagagtcaaatggctctcctcaagcgtattcaacaaggggctgaaggatgcccagaaggtaccccattgtatgggatctgatctggggcctcggtgcacatgctttacatgtgtttagtcgaggttaaaaaaacgtctaggccccccgaaccacggggacgtggttttcctttgaaaaacacgataataccatggtgagcaagggcgaggagctgttcaccggggtggtgcccatcctggtcgagctggacggcgacgtaaacggccacaagttcagcgtgtccggcgagggcgagggcgatgccacctacggcaagctgaccctgaagttcatctgcaccaccggcaagctgcccgtgccctggcccaccctcgtgaccaccctgacctacggcgtgcagtgcttcagccgctaccccgaccacatgaagcagcacgacttcttcaagtccgccatgcccgaaggctacgtccaggagcgcaccatcttcttcaaggacgacggcaactacaagacccgcgccgaggtgaagttcgagggcgacaccctggtgaaccgcatcgagctgaagggcatcgacttcaaggaggacggcaacatcctggggcacaagctggagtacaactacaacagccacaacgtctatatcatggccgacaagcagaagaacggcatcaaggtgaacttcaagatccgccacaacatcgaggacggcagcgtgcagctcgccgaccactaccagcagaacacccccatcggcgacggccccgtgctgctgcccgacaaccactacctgagcacccagtccgccctgagcaaagaccccaacgagaagcgcgatcacatggtcctgctggagttcgtgaccgccgccgggatcactctcggcatggacgagctgtacaagtaa

SEQ ID NO: 705 - protein, 165 aa, synthetic construct
MALPVTALLLPLALLLHAARPGALFLGFLGAAGSTMGAASVTLTVQARLLLSGIVQQQNNLLRAIEAQQHLLQLTVWGIKQLQARVLAVERYLRDQTTTPAPRPPTPAPTIASQPLSLRPEACRPAAGGAVHTRGLDFACDIYIWAPLAGTCGVLLLSLVITLYC

SEQ ID NO: 706 - DNA, 501 bp, synthetic construct
  source 1..501: mol_type = other DNA
atggcactccccgtaactgctctgctgctgccgttggcattgctcctgcacgccgcacgcccgggagctttgttccttgggttcttgggagcagcaggaagcactatgggcgcagcgtcagtaacgctgacggtacaggccagactattattgtctggtatagtgcaacagcaaaacaatttgctgagggctattgaggcgcaacagcatctgttgcaactcacagtctggggcatcaaacagctccaggcaagagtcctggctgtggaaagatacctaagggatcaaaccacgacgccagcgccgcgaccaccaacaccggcgcccaccatcgcgtcgcagcccctgtccctgcgcccagaggcgtgccggccagcggcggggggcgcagtgcacacgagggggctggacttcgcctgtgatatctacatctgggcgcccttggccgggacttgtggggtccttctcctgtcactggttatcaccctttactgctgataa

SEQ ID NO: 707 - protein, 361 aa, synthetic construct
MALPVTALLLPLALLLHAARPDYKDDDDKGGGGSGGGGSLQARILAVERYLKDTTTPAPRPPTPAPTIASQPLSLRPEACRPAAGGAVHTRGLDFACDIYIWAPLAGTCGVLLLSLVITLYCMVSKGEELFTGVVPILVELDGDVNGHKFSVSGEGEGDATYGKLTLKFICTTGKLPVPWPTLVTTLTYGVQCFSRYPDHMKQHDFFKSAMPEGYVQERTIFFKDDGNYKTRAEVKFEGDTLVNRIELKGIDFKEDGNILGHKLEYNYNSHNVYIMADKQKNGIKVNFKIRHNIEDGSVQLADHYQQNTPIGDGPVLLPDNHYLSTQSALSKDPNEKRDHMVLLEFVTAAGITLGMDELYK

SEQ ID NO: 708 - DNA, 1644 bp, synthetic construct
  source 1..1644: mol_type = other DNA
atggcactccccgtaactgctctgctgctgccgttggcattgctcctgcacgccgcacgcccggactacaaagacgatgacgataaaggcggtggtggctctggtggtggcggatccctccaggcaagaatcctagctgtagaaagatacctaaaagataccacgacgccagcgccgcgaccaccaacaccggcgcccaccatcgcgtcgcagcccctgtccctgcgcccagaggcgtgccggccagcggcggggggcgcagtgcacacgagggggctggacttcgcctgtgatatctacatctgggcgcccttggccgggacttgtggggtccttctcctgtcactggttatcaccctttactgctgataaacgttactggccgaagccgcttggaataaggccggtgtgcgtttgtctatatgttattttccaccatattgccgtcttttggcaatgtgagggcccggaaacctggccctgtcttcttgacgagcattcctaggggtctttcccctctcgccaaaggaatgcaaggtctgttgaatgtcgtgaaggaagcagttcctctggaagcttcttgaagacaaacaacgtctgtagcgaccctttgcaggcagcggaaccccccacctggcgacaggtgcctctgcggccaaaagccacgtgtataagatacacctgcaaaggcggcacaaccccagtgccacgttgtgagttggatagttgtggaaagagtcaaatggctctcctcaagcgtattcaacaaggggctgaaggatgcccagaaggtaccccattgtatgggatctgatctggggcctcggtgcacatgctttacatgtgtttagtcgaggttaaaaaaacgtctaggccccccgaaccacggggacgtggttttcctttgaaaaacacgataataccatggtgagcaagggcgaggagctgttcaccggggtggtgcccatcctggtcgagctggacggcgacgtaaacggccacaagttcagcgtgtccggcgagggcgagggcgatgccacctacggcaagctgaccctgaagttcatctgcaccaccggcaagctgcccgtgccctggcccaccctcgtgaccaccctgacctacggcgtgcagtgcttcagccgctaccccgaccacatgaagcagcacgacttcttcaagtccgccatgcccgaaggctacgtccaggagcgcaccatcttcttcaaggacgacggcaactacaagacccgcgccgaggtgaagttcgagggcgacaccctggtgaaccgcatcgagctgaagggcatcgacttcaaggaggacggcaacatcctggggcacaagctggagtacaactacaacagccacaacgtctatatcatggccgacaagcagaagaacggcatcaaggtgaacttcaagatccgccacaacatcgaggacggcagcgtgcagctcgccgaccactaccagcagaacacccccatcggcgacggccccgtgctgctgcccgacaaccactacctgagcacccagtccgccctgagcaaagaccccaacgagaagcgcgatcacatggtcctgctggagttcgtgaccgccgccgggatcactctcggcatggacgagctgtacaagtaa

SEQ ID NO: 709 - protein, 104 aa, synthetic construct; identical to SEQ ID NO: 238

SEQ ID NO: 710 - DNA, 318 bp, synthetic construct
  source 1..318: mol_type = other DNA
atggcactccccgtaactgctctgctgctgccgttggcattgctcctgcacgccgcacgcccgctccaggcaagaatcctagctgtagaaagatacctaaaagataccacgacgccagcgccgcgaccaccaacaccggcgcccaccatcgcgtcgcagcccctgtccctgcgcccagaggcgtgccggccagcggcggggggcgcagtgcacacgagggggctggacttcgcctgtgatatctacatctgggcgcccttggccgggacttgtggggtccttctcctgtcactggttatcaccctttactgctgataa

SEQ ID NO: 711 - protein, 404 aa, synthetic construct
MALPVTALLLPLALLLHAARPDYKDDDDKGGGGSGGGGSAGFGLLLGFGGGGSGGGGSGGGGSAGFGLLLGFGGGGSGGGGSGGGGSAGFGLLLGFTTTPAPRPPTPAPTIASQPLSLRPEACRPAAGGAVHTRGLDFACDIYIWAPLAGTCGVLLLSLVITLYCMVSKGEELFTGVVPILVELDGDVNGHKFSVSGEGEGDATYGKLTLKFICTTGKLPVPWPTLVTTLTYGVQCFSRYPDHMKQHDFFKSAMPEGYVQERTIFFKDDGNYKTRAEVKFEGDTLVNRIELKGIDFKEDGNILGHKLEYNYNSHNVYIMADKQKNGIKVNFKIRHNIEDGSVQLADHYQQNTPIGDGPVLLPDNHYLSTQSALSKDPNEKRDHMVLLEFVTAAGITLGMDELYK

SEQ ID NO: 712 - DNA, 1773 bp, synthetic construct
  source 1..1773: mol_type = other DNA
atggcactccccgtaactgctctgctgctgccgttggcattgctcctgcacgccgcacgcccggactacaaagacgatgacgataaaggcggtggtggctctggtggtggcggatccgccggcttcggcctgctgctgggcttcggtggtggcggatccggtggtggcggttctggtggtggcggctccgccggcttcggcctgctgctgggcttcggtggtggcggatccggtggtggcggttctggtggtggcggctccgccggcttcggcctgctgctgggcttcaccacgacgccagcgccgcgaccaccaacaccggcgcccaccatcgcgtcgcagcccctgtccctgcgcccagaggcgtgccggccagcggcggggggcgcagtgcacacgagggggctggacttcgcctgtgatatctacatctgggcgcccttggccgggacttgtggggtccttctcctgtcactggttatcaccctttactgctgataaacgttactggccgaagccgcttggaataaggccggtgtgcgtttgtctatatgttattttccaccatattgccgtcttttggcaatgtgagggcccggaaacctggccctgtcttcttgacgagcattcctaggggtctttcccctctcgccaaaggaatgcaaggtctgttgaatgtcgtgaaggaagcagttcctctggaagcttcttgaagacaaacaacgtctgtagcgaccctttgcaggcagcggaaccccccacctggcgacaggtgcctctgcggccaaaagccacgtgtataagatacacctgcaaaggcggcacaaccccagtgccacgttgtgagttggatagttgtggaaagagtcaaatggctctcctcaagcgtattcaacaaggggctgaaggatgcccagaaggtaccccattgtatgggatctgatctggggcctcggtgcacatgctttacatgtgtttagtcgaggttaaaaaaacgtctaggccccccgaaccacggggacgtggttttcctttgaaaaacacgataataccatggtgagcaagggcgaggagctgttcaccggggtggtgcccatcctggtcgagctggacggcgacgtaaacggccacaagttcagcgtgtccggcgagggcgagggcgatgccacctacggcaagctgaccctgaagttcatctgcaccaccggcaagctgcccgtgccctggcccaccctcgtgaccaccctgacctacggcgtgcagtgcttcagccgctaccccgaccacatgaagcagcacgacttcttcaagtccgccatgcccgaaggctacgtccaggagcgcaccatcttcttcaaggacgacggcaactacaagacccgcgccgaggtgaagttcgagggcgacaccctggtgaaccgcatcgagctgaagggcatcgacttcaaggaggacggcaacatcctggggcacaagctggagtacaactacaacagccacaacgtctatatcatggccgacaagcagaagaacggcatcaaggtgaacttcaagatccgccacaacatcgaggacggcagcgtgcagctcgccgaccactaccagcagaacacccccatcggcgacggccccgtgctgctgcccgacaaccactacctgagcacccagtccgccctgagcaaagaccccaacgagaagcgcgatcacatggtcctgctggagttcgtgaccgccgccgggatcactctcggcatggacgagctgtacaagtaa

SEQ ID NO: 713 - protein, 147 aa, synthetic construct; identical to SEQ ID NO: 243

SEQ ID NO: 714 - DNA, 447 bp, synthetic construct
  source 1..447: mol_type = other DNA
atggcactccccgtaactgctctgctgctgccgttggcattgctcctgcacgccgcacgcccggccggcttcggcctgctgctgggcttcggtggtggcggatccggtggtggcggttctggtggtggcggctccgccggcttcggcctgctgctgggcttcggtggtggcggatccggtggtggcggttctggtggtggcggctccgccggcttcggcctgctgctgggcttcaccacgacgccagcgccgcgaccaccaacaccggcgcccaccatcgcgtcgcagcccctgtccctgcgcccagaggcgtgccggccagcggcggggggcgcagtgcacacgagggggctggacttcgcctgtgatatctacatctgggcgcccttggccgggacttgtggggtccttctcctgtcactggttatcaccctttactgctgataa

SEQ ID NO: 715 - protein, 368 aa, synthetic construct
MALPVTALLLPLALLLHAARPDYKDDDDKGGGGSGGGGSGNYTCEVTELTREGETIIELKTTTPAPRPPTPAPTIASQPLSLRPEACRPAAGGAVHTRGLDFACDIYIWAPLAGTCGVLLLSLVITLYCMVSKGEELFTGVVPILVELDGDVNGHKFSVSGEGEGDATYGKLTLKFICTTGKLPVPWPTLVTTLTYGVQCFSRYPDHMKQHDFFKSAMPEGYVQERTIFFKDDGNYKTRAEVKFEGDTLVNRIELKGIDFKEDGNILGHKLEYNYNSHNVYIMADKQKNGIKVNFKIRHNIEDGSVQLADHYQQNTPIGDGPVLLPDNHYLSTQSALSKDPNEKRDHMVLLEFVTAAGITLGMDELYK

SEQ ID NO: 716 - DNA, 1665 bp, synthetic construct
  source 1..1665: mol_type = other DNA
atggcactccccgtaactgctctgctgctgccgttggcattgctcctgcacgccgcacgcccggactacaaagacgatgacgataaaggcggtggtggctctggtggtggcggatccggaaactacacttgtgaagtaacagaattaaccagagaaggtgaaacgatcatcgagctaaaaaccacgacgccagcgccgcgaccaccaacaccggcgcccaccatcgcgtcgcagcccctgtccctgcgcccagaggcgtgccggccagcggcggggggcgcagtgcacacgagggggctggacttcgcctgtgatatctacatctgggcgcccttggccgggacttgtggggtccttctcctgtcactggttatcaccctttactgctgataaacgttactggccgaagccgcttggaataaggccggtgtgcgtttgtctatatgttattttccaccatattgccgtcttttggcaatgtgagggcccggaaacctggccctgtcttcttgacgagcattcctaggggtctttcccctctcgccaaaggaatgcaaggtctgttgaatgtcgtgaaggaagcagttcctctggaagcttcttgaagacaaacaacgtctgtagcgaccctttgcaggcagcggaaccccccacctggcgacaggtgcctctgcggccaaaagccacgtgtataagatacacctgcaaaggcggcacaaccccagtgccacgttgtgagttggatagttgtggaaagagtcaaatggctctcctcaagcgtattcaacaaggggctgaaggatgcccagaaggtaccccattgtatgggatctgatctggggcctcggtgcacatgctttacatgtgtttagtcgaggttaaaaaaacgtctaggccccccgaaccacggggacgtggttttcctttgaaaaacacgataataccatggtgagcaagggcgaggagctgttcaccggggtggtgcccatcctggtcgagctggacggcgacgtaaacggccacaagttcagcgtgtccggcgagggcgagggcgatgccacctacggcaagctgaccctgaagttcatctgcaccaccggcaagctgcccgtgccctggcccaccctcgtgaccaccctgacctacggcgtgcagtgcttcagccgctaccccgaccacatgaagcagcacgacttcttcaagtccgccatgcccgaaggctacgtccaggagcgcaccatcttcttcaaggacgacggcaactacaagacccgcgccgaggtgaagttcgagggcgacaccctggtgaaccgcatcgagctgaagggcatcgacttcaaggaggacggcaacatcctggggcacaagctggagtacaactacaacagccacaacgtctatatcatggccgacaagcagaagaacggcatcaaggtgaacttcaagatccgccacaacatcgaggacggcagcgtgcagctcgccgaccactaccagcagaacacccccatcggcgacggccccgtgctgctgcccgacaaccactacctgagcacccagtccgccctgagcaaagaccccaacgagaagcgcgatcacatggtcctgctggagttcgtgaccgccgccgggatcactctcggcatggacgagctgtacaagtaa

SEQ ID NO: 717 - protein, 111 aa, synthetic construct; identical to SEQ ID NO: 248

SEQ ID NO: 718 - DNA, 339 bp, synthetic construct
  source 1..339: mol_type = other DNA
atggcactccccgtaactgctctgctgctgccgttggcattgctcctgcacgccgcacgcccgggaaactacacttgtgaagtaacagaattaaccagagaaggtgaaacgatcatcgagctaaaaaccacgacgccagcgccgcgaccaccaacaccggcgcccaccatcgcgtcgcagcccctgtccctgcgcccagaggcgtgccggccagcggcggggggcgcagtgcacacgagggggctggacttcgcctgtgatatctacatctgggcgcccttggccgggacttgtggggtccttctcctgtcactggttatcaccctttactgctgataa

SEQ ID NO: 719 - protein, 461 aa, synthetic construct
MALPVTALLLPLALLLHAARPDYKDDDDKGGGGSGGGGSLQNRRGLDLLFLKEGGLCAALKEECCFYGGGGSGGGGSGGGGSLQNRRGLDLLFLKEGGLCAALKEECCFYGGGGSGGGGSGGGGSLQNRRGLDLLFLKEGGLCAALKEECCFYTTTPAPRPPTPAPTIASQPLSLRPEACRPAAGGAVHTRGLDFACDIYIWAPLAGTCGVLLLSLVITLYCMVSKGEELFTGVVPILVELDGDVNGHKFSVSGEGEGDATYGKLTLKFICTTGKLPVPWPTLVTTLTYGVQCFSRYPDHMKQHDFFKSAMPEGYVQERTIFFKDDGNYKTRAEVKFEGDTLVNRIELKGIDFKEDGNILGHKLEYNYNSHNVYIMADKQKNGIKVNFKIRHNIEDGSVQLADHYQQNTPIGDGPVLLPDNHYLSTQSALSKDPNEKRDHMVLLEFVTAAGITLGMDELYK

SEQ ID NO: 720 - DNA, 1944 bp, synthetic construct
  source 1..1944: mol_type = other DNA
atggcactccccgtaactgctctgctgctgccgttggcattgctcctgcacgccgcacgcccggactacaaagacgatgacgataaaggcggtggtggctctggtggtggcggatccctgcaaaacagaaggggattagacctgctttttcttaaagagggagggctctgtgctgccttaaaggaagaatgttgcttttatggtggtggcggatccggtggtggcggttctggtggtggcggctccctgcaaaacagaaggggattagacctgctttttcttaaagagggagggctctgtgctgccttaaaggaagaatgttgcttttatggtggtggcggatccggtggtggcggttctggtggtggcggctccctgcaaaacagaaggggattagacctgctttttcttaaagagggagggctctgtgctgccttaaaggaagaatgttgcttttataccacgacgccagcgccgcgaccaccaacaccggcgcccaccatcgcgtcgcagcccctgtccctgcgcccagaggcgtgccggccagcggcggggggcgcagtgcacacgagggggctggacttcgcctgtgatatctacatctgggcgcccttggccgggacttgtggggtccttctcctgtcactggttatcaccctttactgctgataaacgttactggccgaagccgcttggaataaggccggtgtgcgtttgtctatatgttattttccaccatattgccgtcttttggcaatgtgagggcccggaaacctggccctgtcttcttgacgagcattcctaggggtctttcccctctcgccaaaggaatgcaaggtctgttgaatgtcgtgaaggaagcagttcctctggaagcttcttgaagacaaacaacgtctgtagcgaccctttgcaggcagcggaaccccccacctggcgacaggtgcctctgcggccaaaagccacgtgtataagatacacctgcaaaggcggcacaaccccagtgccacgttgtgagttggatagttgtggaaagagtcaaatggctctcctcaagcgtattcaacaaggggctgaaggatgcccagaaggtaccccattgtatgggatctgatctggggcctcggtgcacatgctttacatgtgtttagtcgaggttaaaaaaacgtctaggccccccgaaccacggggacgtggttttcctttgaaaaacacgataataccatggtgagcaagggcgaggagctgttcaccggggtggtgcccatcctggtcgagctggacggcgacgtaaacggccacaagttcagcgtgtccggcgagggcgagggcgatgccacctacggcaagctgaccctgaagttcatctgcaccaccggcaagctgcccgtgccctggcccaccctcgtgaccaccctgacctacggcgtgcagtgcttcagccgctaccccgaccacatgaagcagcacgacttcttcaagtccgccatgcccgaaggctacgtccaggagcgcaccatcttcttcaaggacgacggcaactacaagacccgcgccgaggtgaagttcgagggcgacaccctggtgaaccgcatcgagctgaagggcatcgacttcaaggaggacggcaacatcctggggcacaagctggagtacaactacaacagccacaacgtctatatcatggccgacaagcagaagaacggcatcaaggtgaacttcaagatccgccacaacatcgaggacggcagcgtgcagctcgccgaccactaccagcagaacacccccatcggcgacggccccgtgctgctgcccgacaaccactacctgagcacccagtccgccctgagcaaagaccccaacgagaagcgcgatcacatggtcctgctggagttcgtgaccgccgccgggatcactctcggcatggacgagctgtacaagtaa

SEQ ID NO: 721 - protein, 204 aa, synthetic construct; identical to SEQ ID NO: 253

SEQ ID NO: 722 - DNA, 618 bp, synthetic construct
  source 1..618: mol_type = other DNA
atggcactccccgtaactgctctgctgctgccgttggcattgctcctgcacgccgcacgcccgctgcaaaacagaaggggattagacctgctttttcttaaagagggagggctctgtgctgccttaaaggaagaatgttgcttttatggtggtggcggatccggtggtggcggttctggtggtggcggctccctgcaaaacagaaggggattagacctgctttttcttaaagagggagggctctgtgctgccttaaaggaagaatgttgcttttatggtggtggcggatccggtggtggcggttctggtggtggcggctccctgcaaaacagaaggggattagacctgctttttcttaaagagggagggctctgtgctgccttaaaggaagaatgttgcttttataccacgacgccagcgccgcgaccaccaacaccggcgcccaccatcgcgtcgcagcccctgtccctgcgcccagaggcgtgccggccagcggcggggggcgcagtgcacacgagggggctggacttcgcctgtgatatctacatctgggcgcccttggccgggacttgtggggtccttctcctgtcactggttatcaccctttactgctgataa

SEQ ID NO: 723 - protein, 411 aa, synthetic construct
MALPVTALLLPLALLLHAARPDYKDDDDKGGGGSGGGGSLQNRRGLDLLFLKEGGLCAALKEECCFYGGGGSGGGGSGGGGSGNYTCEVTELTREGETIIELKTTTPAPRPPTPAPTIASQPLSLRPEACRPAAGGAVHTRGLDFACDIYIWAPLAGTCGVLLLSLVITLYCMVSKGEELFTGVVPILVELDGDVNGHKFSVSGEGEGDATYGKLTLKFICTTGKLPVPWPTLVTTLTYGVQCFSRYPDHMKQHDFFKSAMPEGYVQERTIFFKDDGNYKTRAEVKFEGDTLVNRIELKGIDFKEDGNILGHKLEYNYNSHNVYIMADKQKNGIKVNFKIRHNIEDGSVQLADHYQQNTPIGDGPVLLPDNHYLSTQSALSKDPNEKRDHMVLLEFVTAAGITLGMDELYK

SEQ ID NO: 724 - DNA, 1794 bp, synthetic construct
  source 1..1794: mol_type = other DNA
atggcactccccgtaactgctctgctgctgccgttggcattgctcctgcacgccgcacgcccggactacaaagacgatgacgataaaggcggtggtggctctggtggtggcggatccctgcaaaacagaaggggattagacctgctttttcttaaagagggagggctctgtgctgccttaaaggaagaatgttgcttttatggtggtggcggatccggtggtggcggttctggtggtggcggctccggaaactacacttgtgaagtaacagaattaaccagagaaggtgaaacgatcatcgagctaaaaaccacgacgccagcgccgcgaccaccaacaccggcgcccaccatcgcgtcgcagcccctgtccctgcgcccagaggcgtgccggccagcggcggggggcgcagtgcacacgagggggctggacttcgcctgtgatatctacatctgggcgcccttggccgggacttgtggggtccttctcctgtcactggttatcaccctttactgctgataaacgttactggccgaagccgcttggaataaggccggtgtgcgtttgtctatatgttattttccaccatattgccgtcttttggcaatgtgagggcccggaaacctggccctgtcttcttgacgagcattcctaggggtctttcccctctcgccaaaggaatgcaaggtctgttgaatgtcgtgaaggaagcagttcctctggaagcttcttgaagacaaacaacgtctgtagcgaccctttgcaggcagcggaaccccccacctggcgacaggtgcctctgcggccaaaagccacgtgtataagatacacctgcaaaggcggcacaaccccagtgccacgttgtgagttggatagttgtggaaagagtcaaatggctctcctcaagcgtattcaacaaggggctgaaggatgcccagaaggtaccccattgtatgggatctgatctggggcctcggtgcacatgctttacatgtgtttagtcgaggttaaaaaaacgtctaggccccccgaaccacggggacgtggttttcctttgaaaaacacgataataccatggtgagcaagggcgaggagctgttcaccggggtggtgcccatcctggtcgagctggacggcgacgtaaacggccacaagttcagcgtgtccggcgagggcgagggcgatgccacctacggcaagctgaccctgaagttcatctgcaccaccggcaagctgcccgtgccctggcccaccctcgtgaccaccctgacctacggcgtgcagtgcttcagccgctaccccgaccacatgaagcagcacgacttcttcaagtccgccatgcccgaaggctacgtccaggagcgcaccatcttcttcaaggacgacggcaactacaagacccgcgccgaggtgaagttcgagggcgacaccctggtgaaccgcatcgagctgaagggcatcgacttcaaggaggacggcaacatcctggggcacaagctggagtacaactacaacagccacaacgtctatatcatggccgacaagcagaagaacggcatcaaggtgaacttcaagatccgccacaacatcgaggacggcagcgtgcagctcgccgaccactaccagcagaacacccccatcggcgacggccccgtgctgctgcccgacaaccactacctgagcacccagtccgccctgagcaaagaccccaacgagaagcgcgatcacatggtcctgctggagttcgtgaccgccgccgggatcactctcggcatggacgagctgtacaagtaa

SEQ ID NO: 725 - protein, 154 aa, synthetic construct; identical to SEQ ID NO: 256

SEQ ID NO: 726 - DNA, 468 bp, synthetic construct
  source 1..468: mol_type = other DNA
atggcactccccgtaactgctctgctgctgccgttggcattgctcctgcacgccgcacgcccgctgcaaaacagaaggggattagacctgctttttcttaaagagggagggctctgtgctgccttaaaggaagaatgttgcttttatggtggtggcggatccggtggtggcggttctggtggtggcggctccggaaactacacttgtgaagtaacagaattaaccagagaaggtgaaacgatcatcgagctaaaaaccacgacgccagcgccgcgaccaccaacaccggcgcccaccatcgcgtcgcagcccctgtccctgcgcccagaggcgtgccggccagcggcggggggcgcagtgcacacgagggggctggacttcgcctgtgatatctacatctgggcgcccttggccgggacttgtggggtccttctcctgtcactggttatcaccctttactgctgataa

SEQ ID NO: 727 - protein, 411 aa, synthetic construct
MALPVTALLLPLALLLHAARPDYKDDDDKGGGGSGGGGSGNYTCEVTELTREGETIIELKGGGGSGGGGSGGGGSLQNRRGLDLLFLKEGGLCAALKEECCFYTTTPAPRPPTPAPTIASQPLSLRPEACRPAAGGAVHTRGLDFACDIYIWAPLAGTCGVLLLSLVITLYCMVSKGEELFTGVVPILVELDGDVNGHKFSVSGEGEGDATYGKLTLKFICTTGKLPVPWPTLVTTLTYGVQCFSRYPDHMKQHDFFKSAMPEGYVQERTIFFKDDGNYKTRAEVKFEGDTLVNRIELKGIDFKEDGNILGHKLEYNYNSHNVYIMADKQKNGIKVNFKIRHNIEDGSVQLADHYQQNTPIGDGPVLLPDNHYLSTQSALSKDPNEKRDHMVLLEFVTAAGITLGMDELYK

SEQ ID NO: 728 - DNA, 1794 bp, synthetic construct
  source 1..1794: mol_type = other DNA
atggcactccccgtaactgctctgctgctgccgttggcattgctcctgcacgccgcacgcccggactacaaagacgatgacgataaaggcggtggtggctctggtggtggcggatccggaaactacacttgtgaagtaacagaattaaccagagaaggtgaaacgatcatcgagctaaaaggtggtggcggatccggtggtggcggttctggtggtggcggctccctgcaaaacagaaggggattagacctgctttttcttaaagagggagggctctgtgctgccttaaaggaagaatgttgcttttataccacgacgccagcgccgcgaccaccaacaccggcgcccaccatcgcgtcgcagcccctgtccctgcgcccagaggcgtgccggccagcggcggggggcgcagtgcacacgagggggctggacttcgcctgtgatatctacatctgggcgcccttggccgggacttgtggggtccttctcctgtcactggttatcaccctttactgctgataaacgttactggccgaagccgcttggaataaggccggtgtgcgtttgtctatatgttattttccaccatattgccgtcttttggcaatgtgagggcccggaaacctggccctgtcttcttgacgagcattcctaggggtctttcccctctcgccaaaggaatgcaaggtctgttgaatgtcgtgaaggaagcagttcctctggaagcttcttgaagacaaacaacgtctgtagcgaccctttgcaggcagcggaaccccccacctggcgacaggtgcctctgcggccaaaagccacgtgtataagatacacctgcaaaggcggcacaaccccagtgccacgttgtgagttggatagttgtggaaagagtcaaatggctctcctcaagcgtattcaacaaggggctgaaggatgcccagaaggtaccccattgtatgggatctgatctggggcctcggtgcacatgctttacatgtgtttagtcgaggttaaaaaaacgtctaggccccccgaaccacggggacgtggttttcctttgaaaaacacgataataccatggtgagcaagggcgaggagctgttcaccggggtggtgcccatcctggtcgagctggacggcgacgtaaacggccacaagttcagcgtgtccggcgagggcgagggcgatgccacctacggcaagctgaccctgaagttcatctgcaccaccggcaagctgcccgtgccctggcccaccctcgtgaccaccctgacctacggcgtgcagtgcttcagccgctaccccgaccacatgaagcagcacgacttcttcaagtccgccatgcccgaaggctacgtccaggagcgcaccatcttcttcaaggacgacggcaactacaagacccgcgccgaggtgaagttcgagggcgacaccctggtgaaccgcatcgagctgaagggcatcgacttcaaggaggacggcaacatcctggggcacaagctggagtacaactacaacagccacaacgtctatatcatggccgacaagcagaagaacggcatcaaggtgaacttcaagatccgccacaacatcgaggacggcagcgtgcagctcgccgaccactaccagcagaacacccccatcggcgacggccccgtgctgctgcccgacaaccactacctgagcacccagtccgccctgagcaaagaccccaacgagaagcgcgatcacatggtcctgctggagttcgtgaccgccgccgggatcactctcggcatggacgagctgtacaagtaa

SEQ ID NO: 729 - protein, 154 aa, synthetic construct; identical to SEQ ID NO: 259

SEQ ID NO: 730 - DNA, 468 bp, synthetic construct
  source 1..468: mol_type = other DNA
atggcactccccgtaactgctctgctgctgccgttggcattgctcctgcacgccgcacgcccgggaaactacacttgtgaagtaacagaattaaccagagaaggtgaaacgatcatcgagctaaaaggtggtggcggatccggtggtggcggttctggtggtggcggctccctgcaaaacagaaggggattagacctgctttttcttaaagagggagggctctgtgctgccttaaaggaagaatgttgcttttataccacgacgccagcgccgcgaccaccaacaccggcgcccaccatcgcgtcgcagcccctgtccctgcgcccagaggcgtgccggccagcggcggggggcgcagtgcacacgagggggctggacttcgcctgtgatatctacatctgggcgcccttggccgggacttgtggggtccttctcctgtcactggttatcaccctttactgctgataa

SEQ ID NO: 731 - protein, 458 aa, synthetic construct
MALPVTALLLPLALLLHAARPDYKDDDDKGGGGSGGGGSGALFLGFLGAAGSTMGAASVTLTVQARLLLSGIVQQQNNLLRAIEAQQHLLQLTVWGIKQLQARVLAVERYLRDQGGGGSGGGGSGGGGSGNYTCEVTELTREGETIIELKTTTPAPRPPTPAPTIASQPLSLRPEACRPAAGGAVHTRGLDFACDIYIWAPLAGTCGVLLLSLVITLYCMVSKGEELFTGVVPILVELDGDVNGHKFSVSGEGEGDATYGKLTLKFICTTGKLPVPWPTLVTTLTYGVQCFSRYPDHMKQHDFFKSAMPEGYVQERTIFFKDDGNYKTRAEVKFEGDTLVNRIELKGIDFKEDGNILGHKLEYNYNSHNVYIMADKQKNGIKVNFKIRHNIEDGSVQLADHYQQNTPIGDGPVLLPDNHYLSTQSALSKDPNEKRDHMVLLEFVTAAGITLGMDELYK

SEQ ID NO: 732 - DNA, 1935 bp, synthetic construct
  source 1..1935: mol_type = other DNA
atggcactccccgtaactgctctgctgctgccgttggcattgctcctgcacgccgcacgcccggactacaaagacgatgacgataaaggcggtggtggctctggtggtggcggatccggagctttgttccttgggttcttgggagcagcaggaagcactatgggcgcagcgtcagtaacgctgacggtacaggccagactattattgtctggtatagtgcaacagcaaaacaatttgctgagggctattgaggcgcaacagcatctgttgcaactcacagtctggggcatcaaacagctccaggcaagagtcctggctgtggaaagatacctaagggatcaaggtggtggcggatccggtggtggcggttctggtggtggcggctccggaaactacacttgtgaagtaacagaattaaccagagaaggtgaaacgatcatcgagctaaaaaccacgacgccagcgccgcgaccaccaacaccggcgcccaccatcgcgtcgcagcccctgtccctgcgcccagaggcgtgccggccagcggcggggggcgcagtgcacacgagggggctggacttcgcctgtgatatctacatctgggcgcccttggccgggacttgtggggtccttctcctgtcactggttatcaccctttactgctgataaacgttactggccgaagccgcttggaataaggccggtgtgcgtttgtctatatgttattttccaccatattgccgtcttttggcaatgtgagggcccggaaacctggccctgtcttcttgacgagcattcctaggggtctttcccctctcgccaaaggaatgcaaggtctgttgaatgtcgtgaaggaagcagttcctctggaagcttcttgaagacaaacaacgtctgtagcgaccctttgcaggcagcggaaccccccacctggcgacaggtgcctctgcggccaaaagccacgtgtataagatacacctgcaaaggcggcacaaccccagtgccacgttgtgagttggatagttgtggaaagagtcaaatggctctcctcaagcgtattcaacaaggggctgaaggatgcccagaaggtaccccattgtatgggatctgatctggggcctcggtgcacatgctttacatgtgtttagtcgaggttaaaaaaacgtctaggccccccgaaccacggggacgtggttttcctttgaaaaacacgataataccatggtgagcaagggcgaggagctgttcaccggggtggtgcccatcctggtcgagctggacggcgacgtaaacggccacaagttcagcgtgtccggcgagggcgagggcgatgccacctacggcaagctgaccctgaagttcatctgcaccaccggcaagctgcccgtgccctggcccaccctcgtgaccaccctgacctacggcgtgcagtgcttcagccgctaccccgaccacatgaagcagcacgacttcttcaagtccgccatgcccgaaggctacgtccaggagcgcaccatcttcttcaaggacgacggcaactacaagacccgcgccgaggtgaagttcgagggcgacaccctggtgaaccgcatcgagctgaagggcatcgacttcaaggaggacggcaacatcctggggcacaagctggagtacaactacaacagccacaacgtctatatcatggccgacaagcagaagaacggcatcaaggtgaacttcaagatccgccacaacatcgaggacggcagcgtgcagctcgccgaccactaccagcagaacacccccatcggcgacggccccgtgctgctgcccgacaaccactacctgagcacccagtccgccctgagcaaagaccccaacgagaagcgcgatcacatggtcctgctggagttcgtgaccgccgccgggatcactctcggcatggacgagctgtacaagtaa

SEQ ID NO: 733 - protein, 201 aa, synthetic construct
MALPVTALLLPLALLLHAARPGALFLGFLGAAGSTMGAASVTLTVQARLLLSGIVQQQNNLLRAIEAQQHLLQLTVWGIKQLQARVLAVERYLRDQGGGGSGGGGSGGGGSGNYTCEVTELTREGETIIELKTTTPAPRPPTPAPTIASQPLSLRPEACRPAAGGAVHTRGLDFACDIYIWAPLAGTCGVLLLSLVITLYC

SEQ ID NO: 734 - DNA, 609 bp, synthetic construct
  source 1..609: mol_type = other DNA
atggcactccccgtaactgctctgctgctgccgttggcattgctcctgcacgccgcacgcccgggagctttgttccttgggttcttgggagcagcaggaagcactatgggcgcagcgtcagtaacgctgacggtacaggccagactattattgtctggtatagtgcaacagcaaaacaatttgctgagggctattgaggcgcaacagcatctgttgcaactcacagtctggggcatcaaacagctccaggcaagagtcctggctgtggaaagatacctaagggatcaaggtggtggcggatccggtggtggcggttctggtggtggcggctccggaaactacacttgtgaagtaacagaattaaccagagaaggtgaaacgatcatcgagctaaaaaccacgacgccagcgccgcgaccaccaacaccggcgcccaccatcgcgtcgcagcccctgtccctgcgcccagaggcgtgccggccagcggcggggggcgcagtgcacacgagggggctggacttcgcctgtgatatctacatctgggcgcccttggccgggacttgtggggtccttctcctgtcactggttatcaccctttactgctgataa

SEQ ID NO: 735 - protein, 397 aa, synthetic construct
MALPVTALLLPLALLLHAARPDYKDDDDKGGGGSGGGGSLQARILAVERYLKDGGGGSGGGGSGGGGSGNYTCEVTELTREGETIIELKTTTPAPRPPTPAPTIASQPLSLRPEACRPAAGGAVHTRGLDFACDIYIWAPLAGTCGVLLLSLVITLYCMVSKGEELFTGVVPILVELDGDVNGHKFSVSGEGEGDATYGKLTLKFICTTGKLPVPWPTLVTTLTYGVQCFSRYPDHMKQHDFFKSAMPEGYVQERTIFFKDDGNYKTRAEVKFEGDTLVNRIELKGIDFKEDGNILGHKLEYNYNSHNVYIMADKQKNGIKVNFKIRHNIEDGSVQLADHYQQNTPIGDGPVLLPDNHYLSTQSALSKDPNEKRDHMVLLEFVTAAGITLGMDELYK

SEQ ID NO: 736 - DNA, 1752 bp, synthetic construct
  source 1..1752: mol_type = other DNA
atggcactccccgtaactgctctgctgctgccgttggcattgctcctgcacgccgcacgcccggactacaaagacgatgacgataaaggcggtggtggctctggtggtggcggatccctccaggcaagaatcctagctgtagaaagatacctaaaagatggtggtggcggatccggtggtggcggttctggtggtggcggctccggaaactacacttgtgaagtaacagaattaaccagagaaggtgaaacgatcatcgagctaaaaaccacgacgccagcgccgcgaccaccaacaccggcgcccaccatcgcgtcgcagcccctgtccctgcgcccagaggcgtgccggccagcggcggggggcgcagtgcacacgagggggctggacttcgcctgtgatatctacatctgggcgcccttggccgggacttgtggggtccttctcctgtcactggttatcaccctttactgctgataaacgttactggccgaagccgcttggaataaggccggtgtgcgtttgtctatatgttattttccaccatattgccgtcttttggcaatgtgagggcccggaaacctggccctgtcttcttgacgagcattcctaggggtctttcccctctcgccaaaggaatgcaaggtctgttgaatgtcgtgaaggaagcagttcctctggaagcttcttgaagacaaacaacgtctgtagcgaccctttgcaggcagcggaaccccccacctggcgacaggtgcctctgcggccaaaagccacgtgtataagatacacctgcaaaggcggcacaaccccagtgccacgttgtgagttggatagttgtggaaagagtcaaatggctctcctcaagcgtattcaacaaggggctgaaggatgcccagaaggtaccccattgtatgggatctgatctggggcctcggtgcacatgctttacatgtgtttagtcgaggttaaaaaaacgtctaggccccccgaaccacggggacgtggttttcctttgaaaaacacgataataccatggtgagcaagggcgaggagctgttcaccggggtggtgcccatcctggtcgagctggacggcgacgtaaacggccacaagttcagcgtgtccggcgagggcgagggcgatgccacctacggcaagctgaccctgaagttcatctgcaccaccggcaagctgcccgtgccctggcccaccctcgtgaccaccctgacctacggcgtgcagtgcttcagccgctaccccgaccacatgaagcagcacgacttcttcaagtccgccatgcccgaaggctacgtccaggagcgcaccatcttcttcaaggacgacggcaactacaagacccgcgccgaggtgaagttcgagggcgacaccctggtgaaccgcatcgagctgaagggcatcgacttcaaggaggacggcaacatcctggggcacaagctggagtacaactacaacagccacaacgtctatatcatggccgacaagcagaagaacggcatcaaggtgaacttcaagatccgccacaacatcgaggacggcagcgtgcagctcgccgaccactaccagcagaacacccccatcggcgacggccccgtgctgctgcccgacaaccactacctgagcacccagtccgccctgagcaaagaccccaacgagaagcgcgatcacatggtcctgctggagttcgtgaccgccgccgggatcactctcggcatggacgagctgtacaagtaa

SEQ ID NO: 737 - protein, 140 aa, synthetic construct; identical to SEQ ID NO: 265

SEQ ID NO: 738 - DNA, 426 bp, synthetic construct
  source 1..426: mol_type = other DNA
atggcactccccgtaactgctctgctgctgccgttggcattgctcctgcacgccgcacgcccgctccaggcaagaatcctagctgtagaaagatacctaaaagatggtggtggcggatccggtggtggcggttctggtggtggcggctccggaaactacacttgtgaagtaacagaattaaccagagaaggtgaaacgatcatcgagctaaaaaccacgacgccagcgccgcgaccaccaacaccggcgcccaccatcgcgtcgcagcccctgtccctgcgcccagaggcgtgccggccagcggcggggggcgcagtgcacacgagggggctggacttcgcctgtgatatctacatctgggcgcccttggccgggacttgtggggtccttctcctgtcactggttatcaccctttactgctgataa

SEQ ID NO: 739 - protein, 411 aa, synthetic construct
MALPVTALLLPLALLLHAARPDYKDDDDKGGGGSGGGGSAQNRRGLDLLFWEQGGLCKALQEQCRFPGGGGSGGGGSGGGGSGNYTCEVTELTREGETIIELKTTTPAPRPPTPAPTIASQPLSLRPEACRPAAGGAVHTRGLDFACDIYIWAPLAGTCGVLLLSLVITLYCMVSKGEELFTGVVPILVELDGDVNGHKFSVSGEGEGDATYGKLTLKFICTTGKLPVPWPTLVTTLTYGVQCFSRYPDHMKQHDFFKSAMPEGYVQERTIFFKDDGNYKTRAEVKFEGDTLVNRIELKGIDFKEDGNILGHKLEYNYNSHNVYIMADKQKNGIKVNFKIRHNIEDGSVQLADHYQQNTPIGDGPVLLPDNHYLSTQSALSKDPNEKRDHMVLLEFVTAAGITLGMDELYK

SEQ ID NO: 740 - DNA, 1794 bp, synthetic construct
  source 1..1794: mol_type = other DNA
atggcactccccgtaactgctctgctgctgccgttggcattgctcctgcacgccgcacgcccggactacaaagacgatgacgataaaggcggtggtggctctggtggtggcggatccgcccagaacagacgaggccttgatctcctattctgggagcaaggaggattatgcaaagcattacaagaacagtgccgttttccgggtggtggcggatccggtggtggcggttctggtggtggcggctccggaaactacacttgtgaagtaacagaattaaccagagaaggtgaaacgatcatcgagctaaaaaccacgacgccagcgccgcgaccaccaacaccggcgcccaccatcgcgtcgcagcccctgtccctgcgcccagaggcgtgccggccagcggcggggggcgcagtgcacacgagggggctggacttcgcctgtgatatctacatctgggcgcccttggccgggacttgtggggtccttctcctgtcactggttatcaccctttactgctgataaacgttactggccgaagccgcttggaataaggccggtgtgcgtttgtctatatgttattttccaccatattgccgtcttttggcaatgtgagggcccggaaacctggccctgtcttcttgacgagcattcctaggggtctttcccctctcgccaaaggaatgcaaggtctgttgaatgtcgtgaaggaagcagttcctctggaagcttcttgaagacaaacaacgtctgtagcgaccctttgcaggcagcggaaccccccacctggcgacaggtgcctctgcggccaaaagccacgtgtataagatacacctgcaaaggcggcacaaccccagtgccacgttgtgagttggatagttgtggaaagagtcaaatggctctcctcaagcgtattcaacaaggggctgaaggatgcccagaaggtaccccattgtatgggatctgatctggggcctcggtgcacatgctttacatgtgtttagtcgaggttaaaaaaacgtctaggccccccgaaccacggggacgtggttttcctttgaaaaacacgataataccatggtgagcaagggcgaggagctgttcaccggggtggtgcccatcctggtcgagctggacggcgacgtaaacggccacaagttcagcgtgtccggcgagggcgagggcgatgccacctacggcaagctgaccctgaagttcatctgcaccaccggcaagctgcccgtgccctggcccaccctcgtgaccaccctgacctacggcgtgcagtgcttcagccgctaccccgaccacatgaagcagcacgacttcttcaagtccgccatgcccgaaggctacgtccaggagcgcaccatcttcttcaaggacgacggcaactacaagacccgcgccgaggtgaagttcgagggcgacaccctggtgaaccgcatcgagctgaagggcatcgacttcaaggaggacggcaacatcctggggcacaagctggagtacaactacaacagccacaacgtctatatcatggccgacaagcagaagaacggcatcaaggtgaacttcaagatccgccacaacatcgaggacggcagcgtgcagctcgccgaccactaccagcagaacacccccatcggcgacggccccgtgctgctgcccgacaaccactacctgagcacccagtccgccctgagcaaagaccccaacgagaagcgcgatcacatggtcctgctggagttcgtgaccgccgccgggatcactctcggcatggacgagctgtacaagtaa

SEQ ID NO: 741 - protein, 154 aa, synthetic construct; identical to SEQ ID NO: 268

SEQ ID NO: 742 - DNA, 468 bp, synthetic construct
  source 1..468: mol_type = other DNA
atggcactccccgtaactgctctgctgctgccgttggcattgctcctgcacgccgcacgcccggcccagaacagacgaggccttgatctcctattctgggagcaaggaggattatgcaaagcattacaagaacagtgccgttttccgggtggtggcggatccggtggtggcggttctggtggtggcggctccggaaactacacttgtgaagtaacagaattaaccagagaaggtgaaacgatcatcgagctaaaaaccacgacgccagcgccgcgaccaccaacaccggcgcccaccatcgcgtcgcagcccctgtccctgcgcccagaggcgtgccggccagcggcggggggcgcagtgcacacgagggggctggacttcgcctgtgatatctacatctgggcgcccttggccgggacttgtggggtccttctcctgtcactggttatcaccctttactgctgataa

SEQ ID NO: 743 - protein, 454 aa, synthetic construct
MALPVTALLLPLALLLHAARPDYKDDDDKGGGGSGGGGSGNYTCEVTELTREGETIIELKGGGGSGGGGSGGGGSLQNRRGLDLLFLKEGGLCAALKEECCFYGGGGSGGGGSGGGGSLQNRRGLDLLFLKEGGLCAALKEECCFYTTTPAPRPPTPAPTIASQPLSLRPEACRPAAGGAVHTRGLDFACDIYIWAPLAGTCGVLLLSLVITLYCMVSKGEELFTGVVPILVELDGDVNGHKFSVSGEGEGDATYGKLTLKFICTTGKLPVPWPTLVTTLTYGVQCFSRYPDHMKQHDFFKSAMPEGYVQERTIFFKDDGNYKTRAEVKFEGDTLVNRIELKGIDFKEDGNILGHKLEYNYNSHNVYIMADKQKNGIKVNFKIRHNIEDGSVQLADHYQQNTPIGDGPVLLPDNHYLSTQSALSKDPNEKRDHMVLLEFVTAAGITLGMDELYK

SEQ ID NO: 744 - DNA, 1923 bp, synthetic construct
  source 1..1923: mol_type = other DNA
atggcactccccgtaactgctctgctgctgccgttggcattgctcctgcacgccgcacgcccggactacaaagacgatgacgataaaggcggtggtggctctggtggtggcggatccggaaactacacttgtgaagtaacagaattaaccagagaaggtgaaacgatcatcgagctaaaaggtggtggcggatccggtggtggcggttctggtggtggcggctccctgcaaaacagaaggggattagacctgctttttcttaaagagggagggctctgtgctgccttaaaggaagaatgttgcttttatggtggtggcggatccggtggtggcggttctggtggtggcggctccctgcaaaacagaaggggattagacctgctttttcttaaagagggagggctctgtgctgccttaaaggaagaatgttgcttttataccacgacgccagcgccgcgaccaccaacaccggcgcccaccatcgcgtcgcagcccctgtccctgcgcccagaggcgtgccggccagcggcggggggcgcagtgcacacgagggggctggacttcgcctgtgatatctacatctgggcgcccttggccgggacttgtggggtccttctcctgtcactggttatcaccctttactgctgataaacgttactggccgaagccgcttggaataaggccggtgtgcgtttgtctatatgttattttccaccatattgccgtcttttggcaatgtgagggcccggaaacctggccctgtcttcttgacgagcattcctaggggtctttcccctctcgccaaaggaatgcaaggtctgttgaatgtcgtgaaggaagcagttcctctggaagcttcttgaagacaaacaacgtctgtagcgaccctttgcaggcagcggaaccccccacctggcgacaggtgcctctgcggccaaaagccacgtgtataagatacacctgcaaaggcggcacaaccccagtgccacgttgtgagttggatagttgtggaaagagtcaaatggctctcctcaagcgtattcaacaaggggctgaaggatgcccagaaggtaccccattgtatgggatctgatctggggcctcggtgcacatgctttacatgtgtttagtcgaggttaaaaaaacgtctaggccccccgaaccacggggacgtggttttcctttgaaaaacacgataataccatggtgagcaagggcgaggagctgttcaccggggtggtgcccatcctggtcgagctggacggcgacgtaaacggccacaagttcagcgtgtccggcgagggcgagggcgatgccacctacggcaagctgaccctgaagttcatctgcaccaccggcaagctgcccgtgccctggcccaccctcgtgaccaccctgacctacggcgtgcagtgcttcagccgctaccccgaccacatgaagcagcacgacttcttcaagtccgccatgcccgaaggctacgtccaggagcgcaccatcttcttcaaggacgacggcaactacaagacccgcgccgaggtgaagttcgagggcgacaccctggtgaaccgcatcgagctgaagggcatcgacttcaaggaggacggcaacatcctggggcacaagctggagtacaactacaacagccacaacgtctatatcatggccgacaagcagaagaacggcatcaaggtgaacttcaagatccgccacaacatcgaggacggcagcgtgcagctcgccgaccactaccagcagaacacccccatcggcgacggccccgtgctgctgcccgacaaccactacctgagcacccagtccgccctgagcaaagaccccaacgagaagcgcgatcacatggtcctgctggagttcgtgaccgccgccgggatcactctcggcatggacgagctgtacaagtaa

SEQ ID NO: 745 - protein, 197 aa, synthetic construct; identical to SEQ ID NO: 271

SEQ ID NO: 746 - DNA, 597 bp, synthetic construct
  source 1..597: mol_type = other DNA
atggcactccccgtaactgctctgctgctgccgttggcattgctcctgcacgccgcacgcccgggaaactacacttgtgaagtaacagaattaaccagagaaggtgaaacgatcatcgagctaaaaggtggtggcggatccggtggtggcggttctggtggtggcggctccctgcaaaacagaaggggattagacctgctttttcttaaagagggagggctctgtgctgccttaaaggaagaatgttgcttttatggtggtggcggatccggtggtggcggttctggtggtggcggctccctgcaaaacagaaggggattagacctgctttttcttaaagagggagggctctgtgctgccttaaaggaagaatgttgcttttataccacgacgccagcgccgcgaccaccaacaccggcgcccaccatcgcgtcgcagcccctgtccctgcgcccagaggcgtgccggccagcggcggggggcgcagtgcacacgagggggctggacttcgcctgtgatatctacatctgggcgcccttggccgggacttgtggggtccttctcctgtcactggttatcaccctttactgctgataa

SEQ ID NO: 747 - protein, 347 aa, synthetic construct
MALPVTALLLPLALLLHAARPLQNRRGLDLLFLKEGGLCTTTPAPRPPTPAPTIASQPLSLRPEACRPAAGGAVHTRGLDFACDIYIWAPLAGTCGVLLLSLVITLYCMVSKGEELFTGVVPILVELDGDVNGHKFSVSGEGEGDATYGKLTLKFICTTGKLPVPWPTLVTTLTYGVQCFSRYPDHMKQHDFFKSAMPEGYVQERTIFFKDDGNYKTRAEVKFEGDTLVNRIELKGIDFKEDGNILGHKLEYNYNSHNVYIMADKQKNGIKVNFKIRHNIEDGSVQLADHYQQNTPIGDGPVLLPDNHYLSTQSALSKDPNEKRDHMVLLEFVTAAGITLGMDELYK

SEQ ID NO: 748 - DNA, 1047 bp, synthetic construct
  source 1..1047: mol_type = other DNA
atggcactccccgtaactgctctgctgctgccgttggcattgctcctgcacgccgcacgcccgctgcaaaacagaaggggattagacctgctttttcttaaagagggagggctctgcaccacgacgccagcgccgcgaccaccaacaccggcgcccaccatcgcgtcgcagcccctgtccctgcgcccagaggcgtgccggccagcggcggggggcgcagtgcacacgagggggctggacttcgcctgtgatatctacatctgggcgcccttggccgggacttgtggggtccttctcctgtcactggttatcaccctttactgcatggtgagcaagggcgaggagctgttcaccggggtggtgcccatcctggtcgagctggacggcgacgtaaacggccacaagttcagcgtgtccggcgagggcgagggcgatgccacctacggcaagctgaccctgaagttcatctgcaccaccggcaagctgcccgtgccctggcccaccctcgtgaccaccctgacctacggcgtgcagtgcttcagccgctaccccgaccacatgaagcagcacgacttcttcaagtccgccatgcccgaaggctacgtccaggagcgcaccatcttcttcaaggacgacggcaactacaagacccgcgccgaggtgaagttcgagggcgacaccctggtgaaccgcatcgagctgaagggcatcgacttcaaggaggacggcaacatcctggggcacaagctggagtacaactacaacagccacaacgtctatatcatggccgacaagcagaagaacggcatcaaggtgaacttcaagatccgccacaacatcgaggacggcagcgtgcagctcgccgaccactaccagcagaacacccccatcggcgacggccccgtgctgctgcccgacaaccactacctgagcacccagtccgccctgagcaaagaccccaacgagaagcgcgatcacatggtcctgctggagttcgtgaccgccgccgggatcactctcggcatggacgagctgtacaagtgataa

SEQ ID NO: 749 - protein, 108 aa, synthetic construct
MALPVTALLLPLALLLHAARPLQNRRGLDLLFLKEGGLCTTTPAPRPPTPAPTIASQPLSLRPEACRPAAGGAVHTRGLDFACDIYIWAPLAGTCGVLLLSLVITLYC

SEQ ID NO: 750 - DNA, 324 bp, synthetic construct
  source 1..324: mol_type = other DNA
atggcactccccgtaactgctctgctgctgccgttggcattgctcctgcacgccgcacgcccgctgcaaaacagaaggggattagacctgctttttcttaaagagggagggctctgcaccacgacgccagcgccgcgaccaccaacaccggcgcccaccatcgcgtcgcagcccctgtccctgcgcccagaggcgtgccggccagcggcggggggcgcagtgcacacgagggggctggacttcgcctgtgatatctacatctgggcgcccttggccgggacttgtggggtccttctcctgtcactggttatcaccctttactgc

SEQ ID NO: 751 - protein, 553 aa, synthetic construct
MALPVTALLLPLALLLHAARPMWPLVAALLLGSACCGSAQLLFNKTKSVEFTFCNDTVVIPCFVTNMEAQNTTEVYVKWKFKGRDIYTFDGALNKSTVPTDFSSAKIEVSQLLKGDASLKMDKSDAVSHTGNYTCEVTELTREGETIIELKYRVVSWFSPNENILIVIFPIFAILLFWGQFGIKTLKYRSGGMDEKTIALLVAGLVITVIVIVGAILFVPGEYSLKNATGLGLIVTSTGILILLHYYVFSTAIGLTSFVIAILVIQVIAYILAVVGLSLCIAACIPMHGPLLISGLSILALAQLLGLVYMKFVEMVSKGEELFTGVVPILVELDGDVNGHKFSVSGEGEGDATYGKLTLKFICTTGKLPVPWPTLVTTLTYGVQCFSRYPDHMKQHDFFKSAMPEGYVQERTIFFKDDGNYKTRAEVKFEGDTLVNRIELKGIDFKEDGNILGHKLEYNYNSHNVYIMADKQKNGIKVNFKIRHNIEDGSVQLADHYQQNTPIGDGPVLLPDNHYLSTQSALSKDPNEKRDHMVLLEFVTAAGITLGMDELYK

SEQ ID NO: 752 - DNA, 1665 bp, synthetic construct
  source 1..1665: mol_type = other DNA
atggcactccccgtaactgctctgctgctgccgttggcattgctcctgcacgccgcacgcccgatgtggcccctggtagcggcgctgttgctgggctcggcgtgctgcggatcagctcagctactatttaataaaacaaaatctgtagaattcacgttttgtaatgacactgtcgtcattccatgctttgttactaatatggaggcacaaaacactactgaagtatacgtaaagtggaaatttaaaggaagagatatttacacctttgatggagctctaaacaagtccactgtccccactgactttagtagtgcaaaaattgaagtctcacaattactaaaaggagatgcctctttgaagatggataagagtgatgctgtctcacacacaggaaactacacttgtgaagtaacagaattaaccagagaaggtgaaacgatcatcgagctaaaatatcgtgttgtttcatggttttctccaaatgaaaatattcttattgttattttcccaatttttgctatactcctgttctggggacagtttggtattaaaacacttaaatatagatccggtggtatggatgagaaaacaattgctttacttgttgctggactagtgatcactgtcattgtcattgttggagccattcttttcgtcccaggtgaatattcattaaagaatgctactggccttggtttaattgtgacttctacagggatattaatattacttcactactatgtgtttagtacagcgattggattaacctccttcgtcattgccatattggttattcaggtgatagcctatatcctcgctgtggttggactgagtctctgtattgcggcgtgtataccaatgcatggccctcttctgatttcaggtttgagtatcttagctctagcacaattacttggactagtttatatgaaatttgtggaaatggtgagcaagggcgaggagctgttcaccggggtggtgcccatcctggtcgagctggacggcgacgtaaacggccacaagttcagcgtgtccggcgagggcgagggcgatgccacctacggcaagctgaccctgaagttcatctgcaccaccggcaagctgcccgtgccctggcccaccctcgtgaccaccctgacctacggcgtgcagtgcttcagccgctaccccgaccacatgaagcagcacgacttcttcaagtccgccatgcccgaaggctacgtccaggagcgcaccatcttcttcaaggacgacggcaactacaagacccgcgccgaggtgaagttcgagggcgacaccctggtgaaccgcatcgagctgaagggcatcgacttcaaggaggacggcaacatcctggggcacaagctggagtacaactacaacagccacaacgtctatatcatggccgacaagcagaagaacggcatcaaggtgaacttcaagatccgccacaacatcgaggacggcagcgtgcagctcgccgaccactaccagcagaacacccccatcggcgacggccccgtgctgctgcccgacaaccactacctgagcacccagtccgccctgagcaaagaccccaacgagaagcgcgatcacatggtcctgctggagttcgtgaccgccgccgggatcactctcggcatggacgagctgtacaagtgataa

SEQ ID NO: 753 - protein, 553 aa, synthetic construct; identical to SEQ ID NO: 751

SEQ ID NO: 754 - DNA, 1665 bp, synthetic construct; identical to SEQ ID NO: 752
  source 1..1665: mol_type = other DNA

SEQ ID NO: 755 - protein, 476 aa, synthetic construct
MALPVTALLLPLALLLHAARPAVGIGALFLGFLGAAGSTMGAASMTLTVQARQLLSGIVQQQNNLLRAIEAQQHLLQLTVWGIKQLQARILAVERYLKDQQLLGIWGCSGKLICTTAVPWNASWSNKSLEQIWNHTTWMEWDREINNYTSLIHSLIEESQNQQEKNEQELLELDKWASLWNWFNITNWLWYIKLFIMIVGGLVGLRIVFAVLSIVNGGGGSGGGGSGGGGSGGGGSGSMRKGEELFTGVVPILVELDGDVNGHKFSVRGEGEGDATNGKLTLKFICTTGKLPVPWPTLVTTLTYGVQCFARYPDHMKQHDFFKSAMPEGYVQERTISFKDDGTYKTRAEVKFEGDTLVNRIELKGIDFKEDGNILGHKLEYNFNSHNVYITADKQKNGIKANFKIRHNVEDGSVQLADHYQQNTPIGDGPVLLPDNHYLSTQSVLSKDPNEKRDHMVLLEFVTAAGITHGMDELYK

SEQ ID NO: 756 - DNA, 1434 bp, synthetic construct
  source 1..1434: mol_type = other DNA
atggcactccccgtaactgctctgctgctgccgttggcattgctcctgcacgccgcacgcccggcagtgggaataggagctttgttccttgggttcttgggagcagcaggaagcactatgggcgcagcctcaatgacgctgacggtacaggccagacaattattgtctggtatagtgcagcagcagaacaatttgctgagggctattgaggcgcaacagcatctgttgcaactcacagtctggggcatcaagcagctccaggcaagaatcctggctgtggaaagatacctaaaggatcaacagctcctggggatttggggttgctctggaaaactcatttgcaccactgctgtgccttggaatgctagttggagtaataaatctctggaacagatttggaatcacacgacctggatggagtgggacagagaaattaacaattacacaagcttaatacactccttaattgaagaatcgcaaaaccagcaagaaaagaatgaacaagaattattggaattagataaatgggcaagtttgtggaattggtttaacataacaaattggctgtggtatataaaattattcataatgatagtaggaggcttggtaggtttaagaatagtttttgctgtactttctatagtgaatggtggtggcggttctggtggtggcggtagtggcggcggaggaagcggtggtggcggttccggatctatgcgtaaaggcgaagagctgttcactggtgtcgtccctattctggtggaactggatggtgatgtcaacggtcataagttttccgtgcgtggcgagggtgaaggtgacgcaactaatggtaaactgacgctgaagttcatctgtactactggtaaactgccggtaccttggccgactctggtaacgacgctgacttatggtgttcagtgctttgctcgttatccggaccatatgaagcagcatgacttcttcaagtccgccatgccggaaggctatgtgcaggaacgcacgatttcctttaaggatgacggcacgtacaaaacgcgtgcggaagtgaaatttgaaggcgataccctggtaaaccgcattgagctgaaaggcattgactttaaagaagacggcaatatcctgggccataagctggaatacaattttaacagccacaatgtttacatcaccgccgataaacaaaaaaatggcattaaagcgaattttaaaattcgccacaacgtggaggatggcagcgtgcagctggctgatcactaccagcaaaacactccaatcggtgatggtcctgttctgctgccagacaatcactatctgagcacgcaaagcgttctgtctaaagatccgaacgagaaacgcgatcatatggttctgctggagttcgtaaccgcagcgggcatcacgcatggtatggatgaactgtacaaatgataa

SEQ ID NO: 757 - protein, 216 aa, synthetic construct
MALPVTALLLPLALLLHAARPAVGIGALFLGFLGAAGSTMGAASMTLTVQARQLLSGIVQQQNNLLRAIEAQQHLLQLTVWGIKQLQARILAVERYLKDQQLLGIWGCSGKLICTTAVPWNASWSNKSLEQIWNHTTWMEWDREINNYTSLIHSLIEESQNQQEKNEQELLELDKWASLWNWFNITNWLWYIKLFIMIVGGLVGLRIVFAVLSIVN

SEQ ID NO: 758 - DNA, 648 bp, synthetic construct
  source 1..648: mol_type = other DNA
atggcactccccgtaactgctctgctgctgccgttggcattgctcctgcacgccgcacgcccggcagtgggaataggagctttgttccttgggttcttgggagcagcaggaagcactatgggcgcagcctcaatgacgctgacggtacaggccagacaattattgtctggtatagtgcagcagcagaacaatttgctgagggctattgaggcgcaacagcatctgttgcaactcacagtctggggcatcaagcagctccaggcaagaatcctggctgtggaaagatacctaaaggatcaacagctcctggggatttggggttgctctggaaaactcatttgcaccactgctgtgccttggaatgctagttggagtaataaatctctggaacagatttggaatcacacgacctggatggagtgggacagagaaattaacaattacacaagcttaatacactccttaattgaagaatcgcaaaaccagcaagaaaagaatgaacaagaattattggaattagataaatgggcaagtttgtggaattggtttaacataacaaattggctgtggtatataaaattattcataatgatagtaggaggcttggtaggtttaagaatagtttttgctgtactttctatagtgaat

SEQ ID NO: 759 - protein, 445 aa, synthetic construct
MALPVTALLLPLALLLHAARPEPVSLTLALLLGGLTMGGIAAGVGTGTTALVATQQFQQLQAAVHNDLKEVEKSITNLEKSLTSLSEVVLQNRRGLDLLFLKEGGLCAALKEECCFYADHTGLVRDSMAKLRERLSQRQKLFESQQGWFEGLFNKSPWFTTLISTIMGPLIILLLILLFGPCILNGGGGSGGGGSGGGGSGGGGSGSMRKGEELFTGVVPILVELDGDVNGHKFSVRGEGEGDATNGKLTLKFICTTGKLPVPWPTLVTTLTYGVQCFARYPDHMKQHDFFKSAMPEGYVQERTISFKDDGTYKTRAEVKFEGDTLVNRIELKGIDFKEDGNILGHKLEYNFNSHNVYITADKQKNGIKANFKIRHNVEDGSVQLADHYQQNTPIGDGPVLLPDNHYLSTQSVLSKDPNEKRDHMVLLEFVTAAGITHGMDELYK

SEQ ID NO: 760 - DNA, 1341 bp, synthetic construct
  source 1..1341: mol_type = other DNA
atggcactccccgtaactgctctgctgctgccgttggcattgctcctgcacgccgcacgcccggagccggtgtcattaaccttggccctgctgttgggaggacttactatgggcggcatagctgcaggagtaggaaccgggactacagccctagtggccactcagcagttccaacaactccaggctgccgtgcacaatgaccttaaagaagttgaaaagtccatcactaatctagaaaaatctttgacctccttgtccgaagtagtgttgcagaatcgtagaggcctagatctactattcctaaaagagggaggtttgtgtgctgccttaaaagaagaatgctgtttctatgccgaccacacaggattggtacgggatagcatggccaaacttagggaaagattgagtcagagacaaaagctctttgaatcccaacaagggtggtttgaagggctgtttaataagtccccttggttcaccaccctgatatccaccatcatgggtcccctgataatcctcttgttaattttactctttgggccttgtattctcaatggtggtggcggttctggtggtggcggtagtggcggcggaggaagcggtggtggcggttccggatctatgcgtaaaggcgaagagctgttcactggtgtcgtccctattctggtggaactggatggtgatgtcaacggtcataagttttccgtgcgtggcgagggtgaaggtgacgcaactaatggtaaactgacgctgaagttcatctgtactactggtaaactgccggtaccttggccgactctggtaacgacgctgacttatggtgttcagtgctttgctcgttatccggaccatatgaagcagcatgacttcttcaagtccgccatgccggaaggctatgtgcaggaacgcacgatttcctttaaggatgacggcacgtacaaaacgcgtgcggaagtgaaatttgaaggcgataccctggtaaaccgcattgagctgaaaggcattgactttaaagaagacggcaatatcctgggccataagctggaatacaattttaacagccacaatgtttacatcaccgccgataaacaaaaaaatggcattaaagcgaattttaaaattcgccacaacgtggaggatggcagcgtgcagctggctgatcactaccagcaaaacactccaatcggtgatggtcctgttctgctgccagacaatcactatctgagcacgcaaagcgttctgtctaaagatccgaacgagaaacgcgatcatatggttctgctggagttcgtaaccgcagcgggcatcacgcatggtatggatgaactgtacaaatgataa

SEQ ID NO: 761 - protein, 185 aa, synthetic construct
MALPVTALLLPLALLLHAARPEPVSLTLALLLGGLTMGGIAAGVGTGTTALVATQQFQQLQAAVHNDLKEVEKSITNLEKSLTSLSEVVLQNRRGLDLLFLKEGGLCAALKEECCFYADHTGLVRDSMAKLRERLSQRQKLFESQQGWFEGLFNKSPWFTTLISTIMGPLIILLLILLFGPCILN

SEQ ID NO: 762 - DNA, 555 bp, synthetic construct
  source 1..555: mol_type = other DNA
atggcactccccgtaactgctctgctgctgccgttggcattgctcctgcacgccgcacgcccggagccggtgtcattaaccttggccctgctgttgggaggacttactatgggcggcatagctgcaggagtaggaaccgggactacagccctagtggccactcagcagttccaacaactccaggctgccgtgcacaatgaccttaaagaagttgaaaagtccatcactaatctagaaaaatctttgacctccttgtccgaagtagtgttgcagaatcgtagaggcctagatctactattcctaaaagagggaggtttgtgtgctgccttaaaagaagaatgctgtttctatgccgaccacacaggattggtacgggatagcatggccaaacttagggaaagattgagtcagagacaaaagctctttgaatcccaacaagggtggtttgaagggctgtttaataagtccccttggttcaccaccctgatatccaccatcatgggtcccctgataatcctcttgttaattttactctttgggccttgtattctcaat

SEQ ID NO: 763 - protein, 558 aa, synthetic construct
MALPVTALLLPLALLLHAARPMATLLLLLGVLVVSPDALGSTTAVQTPTSGEPLVSTSEPLSSKMYTTSITSDPKADSTGDQTSALPPSTSINEGSPLWTSIGASTGSPLPEPTTYQEVSIKMSSVPQETPHATSHPAVPITANSLGSHTVTGGTITTNSPETSSRTSGAPVTTAASSLETSRGTSGPPLTMATVSLETSKGTSGPPVTMATDSLETSTGTTGPPVTMTTGSLEPSSGASGPQVSSVKLSTMMSPTTSTNASTVPFRNPDENSRGMLPVAVLVALLAVIVLVALLLLWGGGGSGGGGSGGGGSGGGGSGSMRKGEELFTGVVPILVELDGDVNGHKFSVRGEGEGDATNGKLTLKFICTTGKLPVPWPTLVTTLTYGVQCFARYPDHMKQHDFFKSAMPEGYVQERTISFKDDGTYKTRAEVKFEGDTLVNRIELKGIDFKEDGNILGHKLEYNFNSHNVYITADKQKNGIKANFKIRHNVEDGSVQLADHYQQNTPIGDGPVLLPDNHYLSTQSVLSKDPNEKRDHMVLLEFVTAAGITHGMDELYK

SEQ ID NO: 764 - DNA, 1680 bp, synthetic construct
  source 1..1680: mol_type = other DNA
atggcactccccgtaactgctctgctgctgccgttggcattgctcctgcacgccgcacgcccgatggccacgcttctccttctccttggggtgctggtggtaagcccagacgctctggggagcacaacagcagtgcagacacccacctccggagagcctttggtctctactagcgagcccctgagctcaaagatgtacaccacttcaataacaagtgaccctaaggccgacagcactggggaccagacctcagccctacctccctcaacttccatcaatgagggatcccctctttggacttccattggtgccagcactggttcccctttacctgagccaacaacctaccaggaagtttccatcaagatgtcatcagtgccccaggaaacccctcatgcaaccagtcatcctgctgttcccataacagcaaactctctaggatcccacaccgtgacaggtggaaccataacaacgaactctccagaaacctccagtaggaccagtggagcccctgttaccacggcagctagctctctggagacctccagaggcacctctggaccccctcttaccatggcaactgtctctctggagacttccaaaggcacctctggaccccctgttaccatggcaactgactctctggagacctccactgggaccactggaccccctgttaccatgacaactggctctctggagccctccagcggggccagtggaccccaggtctctagcgtaaaactatctacaatgatgtctccaacgacctccaccaacgcaagcactgtgcccttccggaacccagatgagaactcacgaggcatgctgccagtggctgtgcttgtggccctgctggcggtcatagtcctcgtggctctgctcctgctgtggggtggtggcggttctggtggtggcggtagtggcggcggaggaagcggtggtggcggttccggatctatgcgtaaaggcgaagagctgttcactggtgtcgtccctattctggtggaactggatggtgatgtcaacggtcataagttttccgtgcgtggcgagggtgaaggtgacgcaactaatggtaaactgacgctgaagttcatctgtactactggtaaactgccggtaccttggccgactctggtaacgacgctgacttatggtgttcagtgctttgctcgttatccggaccatatgaagcagcatgacttcttcaagtccgccatgccggaaggctatgtgcaggaacgcacgatttcctttaaggatgacggcacgtacaaaacgcgtgcggaagtgaaatttgaaggcgataccctggtaaaccgcattgagctgaaaggcattgactttaaagaagacggcaatatcctgggccataagctggaatacaattttaacagccacaatgtttacatcaccgccgataaacaaaaaaatggcattaaagcgaattttaaaattcgccacaacgtggaggatggcagcgtgcagctggctgatcactaccagcaaaacactccaatcggtgatggtcctgttctgctgccagacaatcactatctgagcacgcaaagcgttctgtctaaagatccgaacgagaaacgcgatcatatggttctgctggagttcgtaaccgcagcgggcatcacgcatggtatggatgaactgtacaaatgataa

SEQ ID NO: 765 - protein, 298 aa, synthetic construct
MALPVTALLLPLALLLHAARPMATLLLLLGVLVVSPDALGSTTAVQTPTSGEPLVSTSEPLSSKMYTTSITSDPKADSTGDQTSALPPSTSINEGSPLWTSIGASTGSPLPEPTTYQEVSIKMSSVPQETPHATSHPAVPITANSLGSHTVTGGTITTNSPETSSRTSGAPVTTAASSLETSRGTSGPPLTMATVSLETSKGTSGPPVTMATDSLETSTGTTGPPVTMTTGSLEPSSGASGPQVSSVKLSTMMSPTTSTNASTVPFRNPDENSRGMLPVAVLVALLAVIVLVALLLLW

SEQ ID NO: 766 - DNA, 894 bp, synthetic construct
  source 1..894: mol_type = other DNA
atggcactccccgtaactgctctgctgctgccgttggcattgctcctgcacgccgcacgcccgatggccacgcttctccttctccttggggtgctggtggtaagcccagacgctctggggagcacaacagcagtgcagacacccacctccggagagcctttggtctctactagcgagcccctgagctcaaagatgtacaccacttcaataacaagtgaccctaaggccgacagcactggggaccagacctcagccctacctccctcaacttccatcaatgagggatcccctctttggacttccattggtgccagcactggttcccctttacctgagccaacaacctaccaggaagtttccatcaagatgtcatcagtgccccaggaaacccctcatgcaaccagtcatcctgctgttcccataacagcaaactctctaggatcccacaccgtgacaggtggaaccataacaacgaactctccagaaacctccagtaggaccagtggagcccctgttaccacggcagctagctctctggagacctccagaggcacctctggaccccctcttaccatggcaactgtctctctggagacttccaaaggcacctctggaccccctgttaccatggcaactgactctctggagacctccactgggaccactggaccccctgttaccatgacaactggctctctggagccctccagcggggccagtggaccccaggtctctagcgtaaaactatctacaatgatgtctccaacgacctccaccaacgcaagcactgtgcccttccggaacccagatgagaactcacgaggcatgctgccagtggctgtgcttgtggccctgctggcggtcatagtcctcgtggctctgctcctgctgtgg

SEQ ID NO: 767 - protein, 468 aa, synthetic construct
MALPVTALLLPLALLLHAARPMERDLERGPPGPPRPPLGPPLSSSIGLALLLLLLALLFWLYIVMSNWTGGALLVLYSFALMLIIIILIIFIFRRDLLCPLGGLGLLLLMITLLLIALWNLHGQALYLGIVLFIFGCLLVLGLWIYFLEILWRLGATIWQLLAFILAFFLAIILLIIALYLQQNWWTLLVDLLWLLLFMAILIWMYYHGGGGSGGGGSGGGGSGGGGSGSMRKGEELFTGVVPILVELDGDVNGHKFSVRGEGEGDATNGKLTLKFICTTGKLPVPWPTLVTTLTYGVQCFARYPDHMKQHDFFKSAMPEGYVQERTISFKDDGTYKTRAEVKFEGDTLVNRIELKGIDFKEDGNILGHKLEYNFNSHNVYITADKQKNGIKANFKIRHNVEDGSVQLADHYQQNTPIGDGPVLLPDNHYLSTQSVLSKDPNEKRDHMVLLEFVTAAGITHGMDELYK

SEQ ID NO: 768 - DNA, 1410 bp, synthetic construct
  source 1..1410: mol_type = other DNA
atggcactccccgtaactgctctgctgctgccgttggcattgctcctgcacgccgcacgcccgatggaacgcgaccttgagaggggcccaccgggcccgccacggccccctctaggaccccccctctcctcttccataggccttgctctccttctcctgctcttggcgctactgttctggctgtatatcgttatgagtaactggactggaggagcgctccttgtcctctattcctttgctctcatgcttattattatcattctcatcatctttatcttcagaagagaccttctctgtccacttggaggccttggtctactcctactgatgatcaccctcctactcatcgctctctggaatttgcacggacaggcattgtaccttggaattgtgctgttcatctttggctgcttacttgtcttaggtctctggatctacttcttggagattctctggcggcttggtgccaccatctggcagcttttggccttcatcctagccttcttcctagccatcatcctgcttattattgctctctatctacaacaaaactggtggactctattggttgatctcctttggctcctcctgtttatggccattttaatctggatgtattatcatggtggtggcggttctggtggtggcggtagtggcggcggaggaagcggtggtggcggttccggatctatgcgtaaaggcgaagagctgttcactggtgtcgtccctattctggtggaactggatggtgatgtcaacggtcataagttttccgtgcgtggcgagggtgaaggtgacgcaactaatggtaaactgacgctgaagttcatctgtactactggtaaactgccggtaccttggccgactctggtaacgacgctgacttatggtgttcagtgctttgctcgttatccggaccatatgaagcagcatgacttcttcaagtccgccatgccggaaggctatgtgcaggaacgcacgatttcctttaaggatgacggcacgtacaaaacgcgtgcggaagtgaaatttgaaggcgataccctggtaaaccgcattgagctgaaaggcattgactttaaagaagacggcaatatcctgggccataagctggaatacaattttaacagccacaatgtttacatcaccgccgataaacaaaaaaatggcattaaagcgaattttaaaattcgccacaacgtggaggatggcagcgtgcagctggctgatcactaccagcaaaacactccaatcggtgatggtcctgttctgctgccagacaatcactatctgagcacgcaaagcgttctgtctaaagatccgaacgagaaacgcgatcatatggttctgctggagttcgtaaccgcagcgggcatcacgcatggtatggatgaactgtacaaatgataa

SEQ ID NO: 769 - protein, 208 aa, synthetic construct
MALPVTALLLPLALLLHAARPMERDLERGPPGPPRPPLGPPLSSSIGLALLLLLLALLFWLYIVMSNWTGGALLVLYSFALMLIIIILIIFIFRRDLLCPLGGLGLLLLMITLLLIALWNLHGQALYLGIVLFIFGCLLVLGLWIYFLEILWRLGATIWQLLAFILAFFLAIILLIIALYLQQNWWTLLVDLLWLLLFMAILIWMYYH

SEQ ID NO: 770 - DNA, 624 bp, synthetic construct
  source 1..624: mol_type = other DNA
atggcactccccgtaactgctctgctgctgccgttggcattgctcctgcacgccgcacgcccgatggaacgcgaccttgagaggggcccaccgggcccgccacggccccctctaggaccccccctctcctcttccataggccttgctctccttctcctgctcttggcgctactgttctggctgtatatcgttatgagtaactggactggaggagcgctccttgtcctctattcctttgctctcatgcttattattatcattctcatcatctttatcttcagaagagaccttctctgtccacttggaggccttggtctactcctactgatgatcaccctcctactcatcgctctctggaatttgcacggacaggcattgtaccttggaattgtgctgttcatctttggctgcttacttgtcttaggtctctggatctacttcttggagattctctggcggcttggtgccaccatctggcagcttttggccttcatcctagccttcttcctagccatcatcctgcttattattgctctctatctacaacaaaactggtggactctattggttgatctcctttggctcctcctgtttatggccattttaatctggatgtattatcat

SEQ ID NO: 771 - protein, 681 aa, synthetic construct
MALPVTALLLPLALLLHAARPMLLAALLAALVARTTLGADVDAVPAPTFPPPAYPYTESWQLTLTTVPSPFVGPADVYHTRPLEDPCGVVALISDPQVDRLLNEAVAHRRPTYRAHVAWYRIADGCAHLLYFIEYADCDPRQIFGRCRRRTTPMWWTPSADYMFPTEDELGLLMVAPGRFNEGQYRRLVSVDGVNILTDFMVALPEGQECPFARVDQHRTYKFGACWNDESFRRGVDVMRFLTPFYQQPPHREVVNYWYRKNGRTLPRAYAAATPYAIDPARPSAGSPRPRPRPRPRPKPEPAPVTPAPPGRLPEPATRDHAAGGHPTPRPPRPETPHRPFAPPAVVPSGWPQPAEPFQPRTPAAPGVSRHRSVIVGTGTAMGALLVGVCVYIFFRLRGAKGYRLLGGPADTDELKAQPGPGGGGSGGGGSGGGGSGGGGSGSMRKGEELFTGVVPILVELDGDVNGHKFSVRGEGEGDATNGKLTLKFICTTGKLPVPWPTLVTTLTYGVQCFARYPDHMKQHDFFKSAMPEGYVQERTISFKDDGTYKTRAEVKFEGDTLVNRIELKGIDFKEDGNILGHKLEYNFNSHNVYITADKQKNGIKANFKIRHNVEDGSVQLADHYQQNTPIGDGPVLLPDNHYLSTQSVLSKDPNEKRDHMVLLEFVTAAGITHGMDELYK

SEQ ID NO: 772 - DNA, 2049 bp, synthetic construct
  source 1..2049: mol_type = other DNA
atggcactccccgtaactgctctgctgctgccgttggcattgctcctgcacgccgcacgcccgatgctgctcgcagcgctattggcggcgctggtcgcccggacgacgctcggcgcggacgtggacgccgtgcccgcgccgaccttccccccgcccgcgtacccgtacaccgagtcgtggcagctgacgctgacgacggtcccctcgcccttcgtcggccccgcggacgtctaccacacgcgcccgctggaggacccgtgcggggtggtggcgctgatctccgacccgcaggtggaccggctgctgaacgaggcggtggcccaccggcggcccacgtaccgcgcccacgtggcctggtaccgcatcgcggacgggtgcgcgcacctgctgtactttatcgagtacgccgactgcgaccccaggcagatctttgggcgctgccggcgccgcaccacgccgatgtggtggaccccgtccgcggactacatgttccccacggaggacgagctggggctgctcatggtggctccggggcggttcaacgagggccagtaccggcgcctggtgtccgtcgacggcgtgaacatcctcaccgacttcatggtggcgctccccgaggggcaagagtgcccgttcgcccgcgtggaccagcaccgcacgtacaagttcggcgcgtgctggaacgacgagagcttcaggcggggcgtggacgtgatgcgattcctgacgccgttctaccagcagcccccgcaccgggaggtggtgaactactggtaccgcaagaacggccggacgctcccgcgggcctacgccgccgccacgccgtacgccatcgaccccgcgcggccctcggcgggctcgccgaggcccaggccccggccccggccccggccgaagcccgagcccgccccggtgacgcccgcgccccccggccgcctgcccgagccggcgacgcgggaccacgccgccgggggccaccccacgccgcgacccccgaggcccgagacgccgcaccgccccttcgccccgccggccgtcgtgcccagcgggtggccgcagcccgcggagccgttccagccgcggacccccgccgcgccgggcgtctcgcgccaccgctcggtgatcgtcggcacgggcaccgcgatgggcgcgctcctggtgggcgtgtgcgtctacatcttcttccgcctgaggggggcgaaggggtatcgcctcctgggcggtcccgcggacaccgacgagctaaaagcgcagcccggtccgggtggtggcggttctggtggtggcggtagtggcggcggaggaagcggtggtggcggttccggatctatgcgtaaaggcgaagagctgttcactggtgtcgtccctattctggtggaactggatggtgatgtcaacggtcataagttttccgtgcgtggcgagggtgaaggtgacgcaactaatggtaaactgacgctgaagttcatctgtactactggtaaactgccggtaccttggccgactctggtaacgacgctgacttatggtgttcagtgctttgctcgttatccggaccatatgaagcagcatgacttcttcaagtccgccatgccggaaggctatgtgcaggaacgcacgatttcctttaaggatgacggcacgtacaaaacgcgtgcggaagtgaaatttgaaggcgataccctggtaaaccgcattgagctgaaaggcattgactttaaagaagacggcaatatcctgggccataagctggaatacaattttaacagccacaatgtttacatcaccgccgataaacaaaaaaatggcattaaagcgaattttaaaattcgccacaacgtggaggatggcagcgtgcagctggctgatcactaccagcaaaacactccaatcggtgatggtcctgttctgctgccagacaatcactatctgagcacgcaaagcgttctgtctaaagatccgaacgagaaacgcgatcatatggttctgctggagttcgtaaccgcagcgggcatcacgcatggtatggatgaactgtacaaatgataa

SEQ ID NO: 773 - protein, 421 aa, synthetic construct
MALPVTALLLPLALLLHAARPMLLAALLAALVARTTLGADVDAVPAPTFPPPAYPYTESWQLTLTTVPSPFVGPADVYHTRPLEDPCGVVALISDPQVDRLLNEAVAHRRPTYRAHVAWYRIADGCAHLLYFIEYADCDPRQIFGRCRRRTTPMWWTPSADYMFPTEDELGLLMVAPGRFNEGQYRRLVSVDGVNILTDFMVALPEGQECPFARVDQHRTYKFGACWNDESFRRGVDVMRFLTPFYQQPPHREVVNYWYRKNGRTLPRAYAAATPYAIDPARPSAGSPRPRPRPRPRPKPEPAPVTPAPPGRLPEPATRDHAAGGHPTPRPPRPETPHRPFAPPAVVPSGWPQPAEPFQPRTPAAPGVSRHRSVIVGTGTAMGALLVGVCVYIFFRLRGAKGYRLLGGPADTDELKAQPGP

SEQ ID NO: 774 - DNA, 1263 bp, synthetic construct
  source 1..1263: mol_type = other DNA
atggcactccccgtaactgctctgctgctgccgttggcattgctcctgcacgccgcacgcccgatgctgctcgcagcgctattggcggcgctggtcgcccggacgacgctcggcgcggacgtggacgccgtgcccgcgccgaccttccccccgcccgcgtacccgtacaccgagtcgtggcagctgacgctgacgacggtcccctcgcccttcgtcggccccgcggacgtctaccacacgcgcccgctggaggacccgtgcggggtggtggcgctgatctccgacccgcaggtggaccggctgctgaacgaggcggtggcccaccggcggcccacgtaccgcgcccacgtggcctggtaccgcatcgcggacgggtgcgcgcacctgctgtactttatcgagtacgccgactgcgaccccaggcagatctttgggcgctgccggcgccgcaccacgccgatgtggtggaccccgtccgcggactacatgttccccacggaggacgagctggggctgctcatggtggctccggggcggttcaacgagggccagtaccggcgcctggtgtccgtcgacggcgtgaacatcctcaccgacttcatggtggcgctccccgaggggcaagagtgcccgttcgcccgcgtggaccagcaccgcacgtacaagttcggcgcgtgctggaacgacgagagcttcaggcggggcgtggacgtgatgcgattcctgacgccgttctaccagcagcccccgcaccgggaggtggtgaactactggtaccgcaagaacggccggacgctcccgcgggcctacgccgccgccacgccgtacgccatcgaccccgcgcggccctcggcgggctcgccgaggcccaggccccggccccggccccggccgaagcccgagcccgccccggtgacgcccgcgccccccggccgcctgcccgagccggcgacgcgggaccacgccgccgggggccaccccacgccgcgacccccgaggcccgagacgccgcaccgccccttcgccccgccggccgtcgtgcccagcgggtggccgcagcccgcggagccgttccagccgcggacccccgccgcgccgggcgtctcgcgccaccgctcggtgatcgtcggcacgggcaccgcgatgggcgcgctcctggtgggcgtgtgcgtctacatcttcttccgcctgaggggggcgaaggggtatcgcctcctgggcggtcccgcggacaccgacgagctaaaagcgcagcccggtccg

SEQ ID NO: 775 - protein, 434 aa, synthetic construct
MALPVTALLLPLALLLHAARPMRKGEELFTGVVPILVELDGDVNGHKFSVRGEGEGDATNGKLTLKFICTTGKLPVPWPTLVTTLTYGVQCFARYPDHMKQHDFFKSAMPEGYVQERTISFKDDGTYKTRAEVKFEGDTLVNRIELKGIDFKEDGNILGHKLEYNFNSHNVYITADKQKNGIKANFKIRHNVEDGSVQLADHYQQNTPIGDGPVLLPDNHYLSTQSVLSKDPNEKRDHMVLLEFVTAAGITHGMDELYKGGGGSGGGGSGGGGSGGGGSGSFFLIMFLTIIVCGMVAALSAIRANCHQEPSVCLQAACPESWIGFQRKCFYFSDDTKNWTSSQRFCDSQDADLAQVESFQELNFLLRYKGPSDHWIGLSREQGQPWKWINGTEWTRQFPILGAGECAYLNDKGASSARHYTERKWICSKSDIHV

SEQ ID NO: 776 - DNA, 1308 bp, synthetic construct
  source 1..1308: mol_type = other DNA
atggcactccccgtaactgctctgctgctgccgttggcattgctcctgcacgccgcacgcccgatgcgtaaaggcgaagagctgttcactggtgtcgtccctattctggtggaactggatggtgatgtcaacggtcataagttttccgtgcgtggcgagggtgaaggtgacgcaactaatggtaaactgacgctgaagttcatctgtactactggtaaactgccggtaccttggccgactctggtaacgacgctgacttatggtgttcagtgctttgctcgttatccggaccatatgaagcagcatgacttcttcaagtccgccatgccggaaggctatgtgcaggaacgcacgatttcctttaaggatgacggcacgtacaaaacgcgtgcggaagtgaaatttgaaggcgataccctggtaaaccgcattgagctgaaaggcattgactttaaagaagacggcaatatcctgggccataagctggaatacaattttaacagccacaatgtttacatcaccgccgataaacaaaaaaatggcattaaagcgaattttaaaattcgccacaacgtggaggatggcagcgtgcagctggctgatcactaccagcaaaacactccaatcggtgatggtcctgttctgctgccagacaatcactatctgagcacgcaaagcgttctgtctaaagatccgaacgagaaacgcgatcatatggttctgctggagttcgtaaccgcagcgggcatcacgcatggtatggatgaactgtacaaaggtggtggcggttctggtggtggcggtagtggcggcggaggaagcggtggtggcggttccggatcttttttcttaatcatgtttctgacaatcatagtgtgtggaatggttgctgctttaagcgcaataagagctaactgccatcaagagccatcagtatgtcttcaagctgcatgcccagaaagctggattggttttcaaagaaagtgtttctatttttctgatgacaccaagaactggacatcaagtcagaggttttgtgactcacaagatgctgatcttgctcaggttgaaagcttccaggaactgaatttcctgttgagatataaaggcccatctgatcactggattgggctgagcagagaacaaggccaaccatggaaatggataaatggtactgaatggacaagacagtttcctatcctgggagcaggagagtgtgcctatttgaatgacaaaggtgccagtagtgccaggcactacacagagaggaagtggatttgttccaaatcagatatacatgtctgataa

SEQ ID NO: 777 - protein, 174 aa, synthetic construct
MALPVTALLLPLALLLHAARPFFLIMFLTIIVCGMVAALSAIRANCHQEPSVCLQAACPESWIGFQRKCFYFSDDTKNWTSSQRFCDSQDADLAQVESFQELNFLLRYKGPSDHWIGLSREQGQPWKWINGTEWTRQFPILGAGECAYLNDKGASSARHYTERKWICSKSDIHV

SEQ ID NO: 778 - DNA, 528 bp, synthetic construct
  source 1..528: mol_type = other DNA
atggcactccccgtaactgctctgctgctgccgttggcattgctcctgcacgccgcacgcccgtttttcttaatcatgtttctgacaatcatagtgtgtggaatggttgctgctttaagcgcaataagagctaactgccatcaagagccatcagtatgtcttcaagctgcatgcccagaaagctggattggttttcaaagaaagtgtttctatttttctgatgacaccaagaactggacatcaagtcagaggttttgtgactcacaagatgctgatcttgctcaggttgaaagcttccaggaactgaatttcctgttgagatataaaggcccatctgatcactggattgggctgagcagagaacaaggccaaccatggaaatggataaatggtactgaatggacaagacagtttcctatcctgggagcaggagagtgtgcctatttgaatgacaaaggtgccagtagtgccaggcactacacagagaggaagtggatttgttccaaatcagatatacatgtctgataa

SEQ ID NO: 779 - protein, 443 aa, synthetic construct
MALPVTALLLPLALLLHAARPMWPLVAALLLGSACCGSAQLLFNKTKSVEFTFCNDTVVIPCFVTNMEAQNTTEVYVKWKFKGRDIYTFDGALNKSTVPTDFSSAKIEVSQLLKGDASLKMDKSDAVSHTGNYTCEVTELTREGETIIELKYRVVSWFSPNENILIVIFPIFAILLFWGQFGIGGGGSGGGGSGGGGSGGGGSGSMRKGEELFTGVVPILVELDGDVNGHKFSVRGEGEGDATNGKLTLKFICTTGKLPVPWPTLVTTLTYGVQCFARYPDHMKQHDFFKSAMPEGYVQERTISFKDDGTYKTRAEVKFEGDTLVNRIELKGIDFKEDGNILGHKLEYNFNSHNVYITADKQKNGIKANFKIRHNVEDGSVQLADHYQQNTPIGDGPVLLPDNHYLSTQSVLSKDPNEKRDHMVLLEFVTAAGITHGMDELYK

SEQ ID NO: 780 - DNA, 1335 bp, synthetic construct
  source 1..1335: mol_type = other DNA
atggcactccccgtaactgctctgctgctgccgttggcattgctcctgcacgccgcacgcccgatgtggcccctggtagcggcgctgttgctgggctcggcgtgctgcggatcagctcagctactatttaataaaacaaaatctgtagaattcacgttttgtaatgacactgtcgtcattccatgctttgttactaatatggaggcacaaaacactactgaagtatacgtaaagtggaaatttaaaggaagagatatttacacctttgatggagctctaaacaagtccactgtccccactgactttagtagtgcaaaaattgaagtctcacaattactaaaaggagatgcctctttgaagatggataagagtgatgctgtctcacacacaggaaactacacttgtgaagtaacagaattaaccagagaaggtgaaacgatcatcgagctaaaatatcgtgttgtttcatggttttctccaaatgaaaatattcttattgttattttcccaatttttgctatactcctgttctggggacagtttggtattggtggtggcggttctggtggtggcggtagtggcggcggaggaagcggtggtggcggttccggatctatgcgtaaaggcgaagagctgttcactggtgtcgtccctattctggtggaactggatggtgatgtcaacggtcataagttttccgtgcgtggcgagggtgaaggtgacgcaactaatggtaaactgacgctgaagttcatctgtactactggtaaactgccggtaccttggccgactctggtaacgacgctgacttatggtgttcagtgctttgctcgttatccggaccatatgaagcagcatgacttcttcaagtccgccatgccggaaggctatgtgcaggaacgcacgatttcctttaaggatgacggcacgtacaaaacgcgtgcggaagtgaaatttgaaggcgataccctggtaaaccgcattgagctgaaaggcattgactttaaagaagacggcaatatcctgggccataagctggaatacaattttaacagccacaatgtttacatcaccgccgataaacaaaaaaatggcattaaagcgaattttaaaattcgccacaacgtggaggatggcagcgtgcagctggctgatcactaccagcaaaacactccaatcggtgatggtcctgttctgctgccagacaatcactatctgagcacgcaaagcgttctgtctaaagatccgaacgagaaacgcgatcatatggttctgctggagttcgtaaccgcagcgggcatcacgcatggtatggatgaactgtacaaatgataa

SEQ ID NO: 781 - protein, 183 aa, synthetic construct
MALPVTALLLPLALLLHAARPMWPLVAALLLGSACCGSAQLLFNKTKSVEFTFCNDTVVIPCFVTNMEAQNTTEVYVKWKFKGRDIYTFDGALNKSTVPTDFSSAKIEVSQLLKGDASLKMDKSDAVSHTGNYTCEVTELTREGETIIELKYRVVSWFSPNENILIVIFPIFAILLFWGQFGI

SEQ ID NO: 782 - DNA, 549 bp, synthetic construct
  source 1..549: mol_type = other DNA
atggcactccccgtaactgctctgctgctgccgttggcattgctcctgcacgccgcacgcccgatgtggcccctggtagcggcgctgttgctgggctcggcgtgctgcggatcagctcagctactatttaataaaacaaaatctgtagaattcacgttttgtaatgacactgtcgtcattccatgctttgttactaatatggaggcacaaaacactactgaagtatacgtaaagtggaaatttaaaggaagagatatttacacctttgatggagctctaaacaagtccactgtccccactgactttagtagtgcaaaaattgaagtctcacaattactaaaaggagatgcctctttgaagatggataagagtgatgctgtctcacacacaggaaactacacttgtgaagtaacagaattaaccagagaaggtgaaacgatcatcgagctaaaatatcgtgttgtttcatggttttctccaaatgaaaatattcttattgttattttcccaatttttgctatactcctgttctggggacagtttggtatt

SEQ ID NO: 783 - protein, 382 aa, synthetic construct
MALPVTALLLPLALLLHAARPLGLALLLLLLALLFWLYIVMSDWTGGALLVLYTTTPAPRPPTPAPTIASQPLSLRPEACRPAAGGAVHTRGLDFACDIYIWAPLAGTCGVLLLSLVITLYCGGGGSGGGGSGGGGSGGGGSGSMRKGEELFTGVVPILVELDGDVNGHKFSVRGEGEGDATNGKLTLKFICTTGKLPVPWPTLVTTLTYGVQCFARYPDHMKQHDFFKSAMPEGYVQERTISFKDDGTYKTRAEVKFEGDTLVNRIELKGIDFKEDGNILGHKLEYNFNSHNVYITADKQKNGIKANFKIRHNVEDGSVQLADHYQQNTPIGDGPVLLPDNHYLSTQSVLSKDPNEKRDHMVLLEFVTAAGITHGMDELYK

SEQ ID NO: 784 - DNA, 1152 bp, synthetic construct
  source 1..1152: mol_type = other DNA
atggcactccccgtaactgctctgctgctgccgttggcattgctcctgcacgccgcacgcccgcttggccttgctctccttctcctgctcttggcgctactgttctggctgtatatcgttatgagtgactggactggaggagcgctccttgtcctctataccacgacgccagcgccgcgaccaccaacaccggcgcccaccatcgcgtcgcagcccctgtccctgcgcccagaggcgtgccggccagcggcggggggcgcagtgcacacgagggggctggacttcgcctgtgatatctacatctgggcgcccttggccgggacttgtggggtccttctcctgtcactggttatcaccctttactgcggtggtggcggttctggtggtggcggtagtggcggcggaggaagcggtggtggcggttccggatctatgcgtaaaggcgaagagctgttcactggtgtcgtccctattctggtggaactggatggtgatgtcaacggtcataagttttccgtgcgtggcgagggtgaaggtgacgcaactaatggtaaactgacgctgaagttcatctgtactactggtaaactgccggtaccttggccgactctggtaacgacgctgacttatggtgttcagtgctttgctcgttatccggaccatatgaagcagcatgacttcttcaagtccgccatgccggaaggctatgtgcaggaacgcacgatttcctttaaggatgacggcacgtacaaaacgcgtgcggaagtgaaatttgaaggcgataccctggtaaaccgcattgagctgaaaggcattgactttaaagaagacggcaatatcctgggccataagctggaatacaattttaacagccacaatgtttacatcaccgccgataaacaaaaaaatggcattaaagcgaattttaaaattcgccacaacgtggaggatggcagcgtgcagctggctgatcactaccagcaaaacactccaatcggtgatggtcctgttctgctgccagacaatcactatctgagcacgcaaagcgttctgtctaaagatccgaacgagaaacgcgatcatatggttctgctggagttcgtaaccgcagcgggcatcacgcatggtatggatgaactgtacaaatgataa

SEQ ID NO: 785 - protein, 122 aa, synthetic construct
MALPVTALLLPLALLLHAARPLGLALLLLLLALLFWLYIVMSDWTGGALLVLYTTTPAPRPPTPAPTIASQPLSLRPEACRPAAGGAVHTRGLDFACDIYIWAPLAGTCGVLLLSLVITLYC

SEQ ID NO: 786 - DNA, 366 bp, synthetic construct
  source 1..366: mol_type = other DNA
atggcactccccgtaactgctctgctgctgccgttggcattgctcctgcacgccgcacgcccgcttggccttgctctccttctcctgctcttggcgctactgttctggctgtatatcgttatgagtgactggactggaggagcgctccttgtcctctataccacgacgccagcgccgcgaccaccaacaccggcgcccaccatcgcgtcgcagcccctgtccctgcgcccagaggcgtgccggccagcggcggggggcgcagtgcacacgagggggctggacttcgcctgtgatatctacatctgggcgcccttggccgggacttgtggggtccttctcctgtcactggttatcaccctttactgc

SEQ ID NO: 787 - protein, 385 aa, synthetic construct
MALPVTALLLPLALLLHAARPLALLFWLLALLFWLLALLFWLLALLFWLLALLFWLTTTPAPRPPTPAPTIASQPLSLRPEACRPAAGGAVHTRGLDFACDIYIWAPLAGTCGVLLLSLVITLYCGGGGSGGGGSGGGGSGGGGSGSMRKGEELFTGVVPILVELDGDVNGHKFSVRGEGEGDATNGKLTLKFICTTGKLPVPWPTLVTTLTYGVQCFARYPDHMKQHDFFKSAMPEGYVQERTISFKDDGTYKTRAEVKFEGDTLVNRIELKGIDFKEDGNILGHKLEYNFNSHNVYITADKQKNGIKANFKIRHNVEDGSVQLADHYQQNTPIGDGPVLLPDNHYLSTQSVLSKDPNEKRDHMVLLEFVTAAGITHGMDELYK

SEQ ID NO: 788 - DNA, 1161 bp, synthetic construct
  source 1..1161: mol_type = other DNA
atggcactccccgtaactgctctgctgctgccgttggcattgctcctgcacgccgcacgcccgttggcgctactgttctggctgttggcgctactgttctggctgttggcgctactgttctggctgttggcgctactgttctggctgttggcgctactgttctggctgaccacgacgccagcgccgcgaccaccaacaccggcgcccaccatcgcgtcgcagcccctgtccctgcgcccagaggcgtgccggccagcggcggggggcgcagtgcacacgagggggctggacttcgcctgtgatatctacatctgggcgcccttggccgggacttgtggggtccttctcctgtcactggttatcaccctttactgcggtggtggcggttctggtggtggcggtagtggcggcggaggaagcggtggtggcggttccggatctatgcgtaaaggcgaagagctgttcactggtgtcgtccctattctggtggaactggatggtgatgtcaacggtcataagttttccgtgcgtggcgagggtgaaggtgacgcaactaatggtaaactgacgctgaagttcatctgtactactggtaaactgccggtaccttggccgactctggtaacgacgctgacttatggtgttcagtgctttgctcgttatccggaccatatgaagcagcatgacttcttcaagtccgccatgccggaaggctatgtgcaggaacgcacgatttcctttaaggatgacggcacgtacaaaacgcgtgcggaagtgaaatttgaaggcgataccctggtaaaccgcattgagctgaaaggcattgactttaaagaagacggcaatatcctgggccataagctggaatacaattttaacagccacaatgtttacatcaccgccgataaacaaaaaaatggcattaaagcgaattttaaaattcgccacaacgtggaggatggcagcgtgcagctggctgatcactaccagcaaaacactccaatcggtgatggtcctgttctgctgccagacaatcactatctgagcacgcaaagcgttctgtctaaagatccgaacgagaaacgcgatcatatggttctgctggagttcgtaaccgcagcgggcatcacgcatggtatggatgaactgtacaaatgataa

SEQ ID NO: 789 - protein, 125 aa, synthetic construct
MALPVTALLLPLALLLHAARPLALLFWLLALLFWLLALLFWLLALLFWLLALLFWLTTTPAPRPPTPAPTIASQPLSLRPEACRPAAGGAVHTRGLDFACDIYIWAPLAGTCGVLLLSLVITLYC

SEQ ID NO: 790 - DNA, 375 bp, synthetic construct
  source 1..375: mol_type = other DNA
atggcactccccgtaactgctctgctgctgccgttggcattgctcctgcacgccgcacgcccgttggcgctactgttctggctgttggcgctactgttctggctgttggcgctactgttctggctgttggcgctactgttctggctgttggcgctactgttctggctgaccacgacgccagcgccgcgaccaccaacaccggcgcccaccatcgcgtcgcagcccctgtccctgcgcccagaggcgtgccggccagcggcggggggcgcagtgcacacgagggggctggacttcgcctgtgatatctacatctgggcgcccttggccgggacttgtggggtccttctcctgtcactggttatcaccctttactgc

SEQ ID NO: 791 - protein, 373 aa, synthetic construct
MALPVTALLLPLALLLHAARPAVGIGALFLGFLGAAGSTMGAASMTLTVQARQLLSGIVQQQNNLLRAIEAQQHLLQLTVWGIKQLQARILLFIMIVGGLVGLRIVFAVLSIVGGGGSGGGGSGGGGSGGGGSGSMRKGEELFTGVVPILVELDGDVNGHKFSVRGEGEGDATNGKLTLKFICTTGKLPVPWPTLVTTLTYGVQCFARYPDHMKQHDFFKSAMPEGYVQERTISFKDDGTYKTRAEVKFEGDTLVNRIELKGIDFKEDGNILGHKLEYNFNSHNVYITADKQKNGIKANFKIRHNVEDGSVQLADHYQQNTPIGDGPVLLPDNHYLSTQSVLSKDPNEKRDHMVLLEFVTAAGITHGMDELYK

SEQ ID NO: 792 - DNA, 1125 bp, synthetic construct
  source 1..1125: mol_type = other DNA
atggcactccccgtaactgctctgctgctgccgttggcattgctcctgcacgccgcacgcccggcagtgggaataggagctttgttccttgggttcttgggagcagcaggaagcactatgggcgcagcctcaatgacgctgacggtacaggccagacaattattgtctggtatagtgcagcagcagaacaatttgctgagggctattgaggcgcaacagcatctgttgcaactcacagtctggggcatcaagcagctccaggcaagaatcctgttattcataatgatagtaggaggcttggtaggtttaagaatagtttttgctgtactttctatagtgggtggtggcggttctggtggtggcggtagtggcggcggaggaagcggtggtggcggttccggatctatgcgtaaaggcgaagagctgttcactggtgtcgtccctattctggtggaactggatggtgatgtcaacggtcataagttttccgtgcgtggcgagggtgaaggtgacgcaactaatggtaaactgacgctgaagttcatctgtactactggtaaactgccggtaccttggccgactctggtaacgacgctgacttatggtgttcagtgctttgctcgttatccggaccatatgaagcagcatgacttcttcaagtccgccatgccggaaggctatgtgcaggaacgcacgatttcctttaaggatgacggcacgtacaaaacgcgtgcggaagtgaaatttgaaggcgataccctggtaaaccgcattgagctgaaaggcattgactttaaagaagacggcaatatcctgggccataagctggaatacaattttaacagccacaatgtttacatcaccgccgataaacaaaaaaatggcattaaagcgaattttaaaattcgccacaacgtggaggatggcagcgtgcagctggctgatcactaccagcaaaacactccaatcggtgatggtcctgttctgctgccagacaatcactatctgagcacgcaaagcgttctgtctaaagatccgaacgagaaacgcgatcatatggttctgctggagttcgtaaccgcagcgggcatcacgcatggtatggatgaactgtacaaatgataa

SEQ ID NO: 793 - protein, 113 aa, synthetic construct
MALPVTALLLPLALLLHAARPAVGIGALFLGFLGAAGSTMGAASMTLTVQARQLLSGIVQQQNNLLRAIEAQQHLLQLTVWGIKQLQARILLFIMIVGGLVGLRIVFAVLSIV

SEQ ID NO: 794 - DNA, 339 bp, synthetic construct
  source 1..339: mol_type = other DNA
atggcactccccgtaactgctctgctgctgccgttggcattgctcctgcacgccgcacgcccggcagtgggaataggagctttgttccttgggttcttgggagcagcaggaagcactatgggcgcagcctcaatgacgctgacggtacaggccagacaattattgtctggtatagtgcagcagcagaacaatttgctgagggctattgaggcgcaacagcatctgttgcaactcacagtctggggcatcaagcagctccaggcaagaatcctgttattcataatgatagtaggaggcttggtaggtttaagaatagtttttgctgtactttctatagtg

SEQ ID NO: 795 - protein, 323 aa, synthetic construct
MALPVTALLLPLALLLHAARPLQNRRGLDLLFLKEGGLCIYIWAPLAGTCGVLLLSLVITLYCGGGGSGGGGSGGGGSGGGGSGSMRKGEELFTGVVPILVELDGDVNGHKFSVRGEGEGDATNGKLTLKFICTTGKLPVPWPTLVTTLTYGVQCFARYPDHMKQHDFFKSAMPEGYVQERTISFKDDGTYKTRAEVKFEGDTLVNRIELKGIDFKEDGNILGHKLEYNFNSHNVYITADKQKNGIKANFKIRHNVEDGSVQLADHYQQNTPIGDGPVLLPDNHYLSTQSVLSKDPNEKRDHMVLLEFVTAAGITHGMDELYK

SEQ ID NO: 796 - DNA, 975 bp, synthetic construct
  source 1..975: mol_type = other DNA
atggcactccccgtaactgctctgctgctgccgttggcattgctcctgcacgccgcacgcccgctgcaaaacagaaggggattagacctgctttttcttaaagagggagggctctgcatctacatctgggcgcccttggccgggacttgtggggtccttctcctgtcactggttatcaccctttactgcggtggtggcggttctggtggtggcggtagtggcggcggaggaagcggtggtggcggttccggatctatgcgtaaaggcgaagagctgttcactggtgtcgtccctattctggtggaactggatggtgatgtcaacggtcataagttttccgtgcgtggcgagggtgaaggtgacgcaactaatggtaaactgacgctgaagttcatctgtactactggtaaactgccggtaccttggccgactctggtaacgacgctgacttatggtgttcagtgctttgctcgttatccggaccatatgaagcagcatgacttcttcaagtccgccatgccggaaggctatgtgcaggaacgcacgatttcctttaaggatgacggcacgtacaaaacgcgtgcggaagtgaaatttgaaggcgataccctggtaaaccgcattgagctgaaaggcattgactttaaagaagacggcaatatcctgggccataagctggaatacaattttaacagccacaatgtttacatcaccgccgataaacaaaaaaatggcattaaagcgaattttaaaattcgccacaacgtggaggatggcagcgtgcagctggctgatcactaccagcaaaacactccaatcggtgatggtcctgttctgctgccagacaatcactatctgagcacgcaaagcgttctgtctaaagatccgaacgagaaacgcgatcatatggttctgctggagttcgtaaccgcagcgggcatcacgcatggtatggatgaactgtacaaatgataa

SEQ ID NO: 797 - protein, 63 aa, synthetic construct
MALPVTALLLPLALLLHAARPLQNRRGLDLLFLKEGGLCIYIWAPLAGTCGVLLLSLVITLYC

SEQ ID NO: 798 - DNA, 189 bp, synthetic construct
  source 1..189: mol_type = other DNA
atggcactccccgtaactgctctgctgctgccgttggcattgctcctgcacgccgcacgcccgctgcaaaacagaaggggattagacctgctttttcttaaagagggagggctctgcatctacatctgggcgcccttggccgggacttgtggggtccttctcctgtcactggttatcaccctttactgc

SEQ ID NO: 799 - protein, 350 aa, synthetic construct
MALPVTALLLPLALLLHAARPLQNRRGLDLLFLKEGGLAQNRRGLDLLFWEQGGLCKALQEQCRFPIYIWAPLAGTCGVLLLSLVITLYCGGGGSGGGGSGGGGSGGGGSGSMRKGEELFTGVVPILVELDGDVNGHKFSVRGEGEGDATNGKLTLKFICTTGKLPVPWPTLVTTLTYGVQCFARYPDHMKQHDFFKSAMPEGYVQERTISFKDDGTYKTRAEVKFEGDTLVNRIELKGIDFKEDGNILGHKLEYNFNSHNVYITADKQKNGIKANFKIRHNVEDGSVQLADHYQQNTPIGDGPVLLPDNHYLSTQSVLSKDPNEKRDHMVLLEFVTAAGITHGMDELYK

SEQ ID NO: 800 - DNA, 1056 bp, synthetic construct
  source 1..1056: mol_type = other DNA
atggcactccccgtaactgctctgctgctgccgttggcattgctcctgcacgccgcacgcccgctgcaaaacagaaggggattagacctgctttttcttaaagagggagggctcgcccagaacagacgaggccttgatctcctattctgggagcaaggaggattatgcaaagcattacaagaacagtgccgttttccgatctacatctgggcgcccttggccgggacttgtggggtccttctcctgtcactggttatcaccctttactgcggtggtggcggttctggtggtggcggtagtggcggcggaggaagcggtggtggcggttccggatctatgcgtaaaggcgaagagctgttcactggtgtcgtccctattctggtggaactggatggtgatgtcaacggtcataagttttccgtgcgtggcgagggtgaaggtgacgcaactaatggtaaactgacgctgaagttcatctgtactactggtaaactgccggtaccttggccgactctggtaacgacgctgacttatggtgttcagtgctttgctcgttatccggaccatatgaagcagcatgacttcttcaagtccgccatgccggaaggctatgtgcaggaacgcacgatttcctttaaggatgacggcacgtacaaaacgcgtgcggaagtgaaatttgaaggcgataccctggtaaaccgcattgagctgaaaggcattgactttaaagaagacggcaatatcctgggccataagctggaatacaattttaacagccacaatgtttacatcaccgccgataaacaaaaaaatggcattaaagcgaattttaaaattcgccacaacgtggaggatggcagcgtgcagctggctgatcactaccagcaaaacactccaatcggtgatggtcctgttctgctgccagacaatcactatctgagcacgcaaagcgttctgtctaaagatccgaacgagaaacgcgatcatatggttctgctggagttcgtaaccgcagcgggcatcacgcatggtatggatgaactgtacaaatgataa

SEQ ID NO: 801 - protein, 90 aa, synthetic construct
MALPVTALLLPLALLLHAARPLQNRRGLDLLFLKEGGLAQNRRGLDLLFWEQGGLCKALQEQCRFPIYIWAPLAGTCGVLLLSLVITLYC

SEQ ID NO: 802 - DNA, 270 bp, synthetic construct
  source 1..270: mol_type = other DNA
atggcactccccgtaactgctctgctgctgccgttggcattgctcctgcacgccgcacgcccgctgcaaaacagaaggggattagacctgctttttcttaaagagggagggctcgcccagaacagacgaggccttgatctcctattctgggagcaaggaggattatgcaaagcattacaagaacagtgccgttttccgatctacatctgggcgcccttggccgggacttgtggggtccttctcctgtcactggttatcaccctttactgc

SEQ ID NO: 803 - protein, 354 aa, synthetic construct
MALPVTALLLPLALLLHAARPLQNRRGLDLLFLKEGGLLGLALLLLLLALLFWLYIVMSDWTGGALLVLYIYIWAPLAGTCGVLLLSLVITLYCGGGGSGGGGSGGGGSGGGGSGSMRKGEELFTGVVPILVELDGDVNGHKFSVRGEGEGDATNGKLTLKFICTTGKLPVPWPTLVTTLTYGVQCFARYPDHMKQHDFFKSAMPEGYVQERTISFKDDGTYKTRAEVKFEGDTLVNRIELKGIDFKEDGNILGHKLEYNFNSHNVYITADKQKNGIKANFKIRHNVEDGSVQLADHYQQNTPIGDGPVLLPDNHYLSTQSVLSKDPNEKRDHMVLLEFVTAAGITHGMDELYK

SEQ ID NO: 804 - DNA, 1068 bp, synthetic construct
  source 1..1068: mol_type = other DNA
atggcactccccgtaactgctctgctgctgccgttggcattgctcctgcacgccgcacgcccgctgcaaaacagaaggggattagacctgctttttcttaaagagggagggctccttggccttgctctccttctcctgctcttggcgctactgttctggctgtatatcgttatgagtgactggactggaggagcgctccttgtcctctatatctacatctgggcgcccttggccgggacttgtggggtccttctcctgtcactggttatcaccctttactgcggtggtggcggttctggtggtggcggtagtggcggcggaggaagcggtggtggcggttccggatctatgcgtaaaggcgaagagctgttcactggtgtcgtccctattctggtggaactggatggtgatgtcaacggtcataagttttccgtgcgtggcgagggtgaaggtgacgcaactaatggtaaactgacgctgaagttcatctgtactactggtaaactgccggtaccttggccgactctggtaacgacgctgacttatggtgttcagtgctttgctcgttatccggaccatatgaagcagcatgacttcttcaagtccgccatgccggaaggctatgtgcaggaacgcacgatttcctttaaggatgacggcacgtacaaaacgcgtgcggaagtgaaatttgaaggcgataccctggtaaaccgcattgagctgaaaggcattgactttaaagaagacggcaatatcctgggccataagctggaatacaattttaacagccacaatgtttacatcaccgccgataaacaaaaaaatggcattaaagcgaattttaaaattcgccacaacgtggaggatggcagcgtgcagctggctgatcactaccagcaaaacactccaatcggtgatggtcctgttctgctgccagacaatcactatctgagcacgcaaagcgttctgtctaaagatccgaacgagaaacgcgatcatatggttctgctggagttcgtaaccgcagcgggcatcacgcatggtatggatgaactgtacaaatgataa

SEQ ID NO: 805 - protein, 94 aa, synthetic construct
MALPVTALLLPLALLLHAARPLQNRRGLDLLFLKEGGLLGLALLLLLLALLFWLYIVMSDWTGGALLVLYIYIWAPLAGTCGVLLLSLVITLYC

SEQ ID NO: 806 - DNA, 282 bp, synthetic construct
  source 1..282: mol_type = other DNA
atggcactccccgtaactgctctgctgctgccgttggcattgctcctgcacgccgcacgcccgctgcaaaacagaaggggattagacctgctttttcttaaagagggagggctccttggccttgctctccttctcctgctcttggcgctactgttctggctgtatatcgttatgagtgactggactggaggagcgctccttgtcctctatatctacatctgggcgcccttggccgggacttgtggggtccttctcctgtcactggttatcaccctttactgc

SEQ ID NO: 807 - protein, 390 aa, synthetic construct
MALPVTALLLPLALLLHAARPAVGIGALFLGFLGAAGLQNRRGLDLLFLKEGGLSTMGAASMTLTVQARQLLSGIVQQQNNLLRAIEAQQHLLQLTVWGIKQLQARILLFIMIVGGLVGLRIVFAVLSIVGGGGSGGGGSGGGGSGGGGSGSMRKGEELFTGVVPILVELDGDVNGHKFSVRGEGEGDATNGKLTLKFICTTGKLPVPWPTLVTTLTYGVQCFARYPDHMKQHDFFKSAMPEGYVQERTISFKDDGTYKTRAEVKFEGDTLVNRIELKGIDFKEDGNILGHKLEYNFNSHNVYITADKQKNGIKANFKIRHNVEDGSVQLADHYQQNTPIGDGPVLLPDNHYLSTQSVLSKDPNEKRDHMVLLEFVTAAGITHGMDELYK

SEQ ID NO: 808 - DNA, 1176 bp, synthetic construct
  source 1..1176: mol_type = other DNA
atggcactccccgtaactgctctgctgctgccgttggcattgctcctgcacgccgcacgcccggcagtgggaataggagctttgttccttgggttcttgggagcagcaggactgcaaaacagaaggggattagacctgctttttcttaaagagggagggctcagcactatgggcgcagcctcaatgacgctgacggtacaggccagacaattattgtctggtatagtgcagcagcagaacaatttgctgagggctattgaggcgcaacagcatctgttgcaactcacagtctggggcatcaagcagctccaggcaagaatcctgttattcataatgatagtaggaggcttggtaggtttaagaatagtttttgctgtactttctatagtgggtggtggcggttctggtggtggcggtagtggcggcggaggaagcggtggtggcggttccggatctatgcgtaaaggcgaagagctgttcactggtgtcgtccctattctggtggaactggatggtgatgtcaacggtcataagttttccgtgcgtggcgagggtgaaggtgacgcaactaatggtaaactgacgctgaagttcatctgtactactggtaaactgccggtaccttggccgactctggtaacgacgctgacttatggtgttcagtgctttgctcgttatccggaccatatgaagcagcatgacttcttcaagtccgccatgccggaaggctatgtgcaggaacgcacgatttcctttaaggatgacggcacgtacaaaacgcgtgcggaagtgaaatttgaaggcgataccctggtaaaccgcattgagctgaaaggcattgactttaaagaagacggcaatatcctgggccataagctggaatacaattttaacagccacaatgtttacatcaccgccgataaacaaaaaaatggcattaaagcgaattttaaaattcgccacaacgtggaggatggcagcgtgcagctggctgatcactaccagcaaaacactccaatcggtgatggtcctgttctgctgccagacaatcactatctgagcacgcaaagcgttctgtctaaagatccgaacgagaaacgcgatcatatggttctgctggagttcgtaaccgcagcgggcatcacgcatggtatggatgaactgtacaaatgataa

SEQ ID NO: 809 - protein, 130 aa, synthetic construct
MALPVTALLLPLALLLHAARPAVGIGALFLGFLGAAGLQNRRGLDLLFLKEGGLSTMGAASMTLTVQARQLLSGIVQQQNNLLRAIEAQQHLLQLTVWGIKQLQARILLFIMIVGGLVGLRIVFAVLSIV

SEQ ID NO: 810 - DNA, 390 bp, synthetic construct
  source 1..390: mol_type = other DNA
atggcactccccgtaactgctctgctgctgccgttggcattgctcctgcacgccgcacgcccggcagtgggaataggagctttgttccttgggttcttgggagcagcaggactgcaaaacagaaggggattagacctgctttttcttaaagagggagggctcagcactatgggcgcagcctcaatgacgctgacggtacaggccagacaattattgtctggtatagtgcagcagcagaacaatttgctgagggctattgaggcgcaacagcatctgttgcaactcacagtctggggcatcaagcagctccaggcaagaatcctgttattcataatgatagtaggaggcttggtaggtttaagaatagtttttgctgtactttctatagtg

SEQ ID NO: 811 - protein, 366 aa, synthetic construct
MALPVTALLLPLALLLHAARPLGLALLLLLLALLFWLTTTPAPRPPTPAPTIASQPLSLRPEACRPAAGGAVHTRGLDFACDIYIWAPLAGTCGVLLLSLVITLYCGGGGSGGGGSGGGGSGGGGSGSMRKGEELFTGVVPILVELDGDVNGHKFSVRGEGEGDATNGKLTLKFICTTGKLPVPWPTLVTTLTYGVQCFARYPDHMKQHDFFKSAMPEGYVQERTISFKDDGTYKTRAEVKFEGDTLVNRIELKGIDFKEDGNILGHKLEYNFNSHNVYITADKQKNGIKANFKIRHNVEDGSVQLADHYQQNTPIGDGPVLLPDNHYLSTQSVLSKDPNEKRDHMVLLEFVTAAGITHGMDELYK

SEQ ID NO: 812 - DNA, 1104 bp, synthetic construct
  source 1..1104: mol_type = other DNA
atggcactccccgtaactgctctgctgctgccgttggcattgctcctgcacgccgcacgcccgcttggccttgctctccttctcctgctcttggcgctactgttctggctgaccacgacgccagcgccgcgaccaccaacaccggcgcccaccatcgcgtcgcagcccctgtccctgcgcccagaggcgtgccggccagcggcggggggcgcagtgcacacgagggggctggacttcgcctgtgatatctacatctgggcgcccttggccgggacttgtggggtccttctcctgtcactggttatcaccctttactgcggtggtggcggttctggtggtggcggtagtggcggcggaggaagcggtggtggcggttccggatctatgcgtaaaggcgaagagctgttcactggtgtcgtccctattctggtggaactggatggtgatgtcaacggtcataagttttccgtgcgtggcgagggtgaaggtgacgcaactaatggtaaactgacgctgaagttcatctgtactactggtaaactgccggtaccttggccgactctggtaacgacgctgacttatggtgttcagtgctttgctcgttatccggaccatatgaagcagcatgacttcttcaagtccgccatgccggaaggctatgtgcaggaacgcacgatttcctttaaggatgacggcacgtacaaaacgcgtgcggaagtgaaatttgaaggcgataccctggtaaaccgcattgagctgaaaggcattgactttaaagaagacggcaatatcctgggccataagctggaatacaattttaacagccacaatgtttacatcaccgccgataaacaaaaaaatggcattaaagcgaattttaaaattcgccacaacgtggaggatggcagcgtgcagctggctgatcactaccagcaaaacactccaatcggtgatggtcctgttctgctgccagacaatcactatctgagcacgcaaagcgttctgtctaaagatccgaacgagaaacgcgatcatatggttctgctggagttcgtaaccgcagcgggcatcacgcatggtatggatgaactgtacaaatgataa

SEQ ID NO: 813 - protein, 106 aa, synthetic construct
MALPVTALLLPLALLLHAARPLGLALLLLLLALLFWLTTTPAPRPPTPAPTIASQPLSLRPEACRPAAGGAVHTRGLDFACDIYIWAPLAGTCGVLLLSLVITLYC

SEQ ID NO: 814 - DNA, 318 bp, synthetic construct
  source 1..318: mol_type = other DNA
atggcactccccgtaactgctctgctgctgccgttggcattgctcctgcacgccgcacgcccgcttggccttgctctccttctcctgctcttggcgctactgttctggctgaccacgacgccagcgccgcgaccaccaacaccggcgcccaccatcgcgtcgcagcccctgtccctgcgcccagaggcgtgccggccagcggcggggggcgcagtgcacacgagggggctggacttcgcctgtgatatctacatctgggcgcccttggccgggacttgtggggtccttctcctgtcactggttatcaccctttactgc

SEQ ID NO: 815 - protein, 475 aa, synthetic construct
MALPVTALLLPLALLLHAARPLGLALLLLLLALLFWLYIVMSDWTGGALLVLYMWPLVAALLLGSACCGSAQLLFNKTKSVEFTFCNDTVVIPCFVTNMEAQNTTEVYVKWKFKGRDIYTFDGALNKSTVPTDFSSAKIEVSQLLKGDASLKMDKSDAVSHTGNYTCEVTELTREGETIIELKYRVVSWFSPNENILIVIFPIFAILLFWGQFGIGGGGSGGGGSGGGGSGGGGSGSMRKGEELFTGVVPILVELDGDVNGHKFSVRGEGEGDATNGKLTLKFICTTGKLPVPWPTLVTTLTYGVQCFARYPDHMKQHDFFKSAMPEGYVQERTISFKDDGTYKTRAEVKFEGDTLVNRIELKGIDFKEDGNILGHKLEYNFNSHNVYITADKQKNGIKANFKIRHNVEDGSVQLADHYQQNTPIGDGPVLLPDNHYLSTQSVLSKDPNEKRDHMVLLEFVTAAGITHGMDELYK

SEQ ID NO: 816 - DNA, 1431 bp, synthetic construct
  source 1..1431: mol_type = other DNA
atggcactccccgtaactgctctgctgctgccgttggcattgctcctgcacgccgcacgcccgcttggccttgctctccttctcctgctcttggcgctactgttctggctgtatatcgttatgagtgactggactggaggagcgctccttgtcctctatatgtggcccctggtagcggcgctgttgctgggctcggcgtgctgcggatcagctcagctactatttaataaaacaaaatctgtagaattcacgttttgtaatgacactgtcgtcattccatgctttgttactaatatggaggcacaaaacactactgaagtatacgtaaagtggaaatttaaaggaagagatatttacacctttgatggagctctaaacaagtccactgtccccactgactttagtagtgcaaaaattgaagtctcacaattactaaaaggagatgcctctttgaagatggataagagtgatgctgtctcacacacaggaaactacacttgtgaagtaacagaattaaccagagaaggtgaaacgatcatcgagctaaaatatcgtgttgtttcatggttttctccaaatgaaaatattcttattgttattttcccaatttttgctatactcctgttctggggacagtttggtattggtggtggcggttctggtggtggcggtagtggcggcggaggaagcggtggtggcggttccggatctatgcgtaaaggcgaagagctgttcactggtgtcgtccctattctggtggaactggatggtgatgtcaacggtcataagttttccgtgcgtggcgagggtgaaggtgacgcaactaatggtaaactgacgctgaagttcatctgtactactggtaaactgccggtaccttggccgactctggtaacgacgctgacttatggtgttcagtgctttgctcgttatccggaccatatgaagcagcatgacttcttcaagtccgccatgccggaaggctatgtgcaggaacgcacgatttcctttaaggatgacggcacgtacaaaacgcgtgcggaagtgaaatttgaaggcgataccctggtaaaccgcattgagctgaaaggcattgactttaaagaagacggcaatatcctgggccataagctggaatacaattttaacagccacaatgtttacatcaccgccgataaacaaaaaaatggcattaaagcgaattttaaaattcgccacaacgtggaggatggcagcgtgcagctggctgatcactaccagcaaaacactccaatcggtgatggtcctgttctgctgccagacaatcactatctgagcacgcaaagcgttctgtctaaagatccgaacgagaaacgcgatcatatggttctgctggagttcgtaaccgcagcgggcatcacgcatggtatggatgaactgtacaaatgataa

SEQ ID NO: 817 - protein, 215 aa, synthetic construct
MALPVTALLLPLALLLHAARPLGLALLLLLLALLFWLYIVMSDWTGGALLVLYMWPLVAALLLGSACCGSAQLLFNKTKSVEFTFCNDTVVIPCFVTNMEAQNTTEVYVKWKFKGRDIYTFDGALNKSTVPTDFSSAKIEVSQLLKGDASLKMDKSDAVSHTGNYTCEVTELTREGETIIELKYRVVSWFSPNENILIVIFPIFAILLFWGQFGI

SEQ ID NO: 818 - DNA, 645 bp, synthetic construct
  source 1..645: mol_type = other DNA
atggcactccccgtaactgctctgctgctgccgttggcattgctcctgcacgccgcacgcccgcttggccttgctctccttctcctgctcttggcgctactgttctggctgtatatcgttatgagtgactggactggaggagcgctccttgtcctctatatgtggcccctggtagcggcgctgttgctgggctcggcgtgctgcggatcagctcagctactatttaataaaacaaaatctgtagaattcacgttttgtaatgacactgtcgtcattccatgctttgttactaatatggaggcacaaaacactactgaagtatacgtaaagtggaaatttaaaggaagagatatttacacctttgatggagctctaaacaagtccactgtccccactgactttagtagtgcaaaaattgaagtctcacaattactaaaaggagatgcctctttgaagatggataagagtgatgctgtctcacacacaggaaactacacttgtgaagtaacagaattaaccagagaaggtgaaacgatcatcgagctaaaatatcgtgttgtttcatggttttctccaaatgaaaatattcttattgttattttcccaatttttgctatactcctgttctggggacagtttggtatt

SEQ ID NO: 819 - protein, 471 aa, synthetic construct
MALPVTALLLPLALLLHAARPLQNRRGLDLLFLKEGGLCAALKEECCFYMWPLVAALLLGSACCGSAQLLFNKTKSVEFTFCNDTVVIPCFVTNMEAQNTTEVYVKWKFKGRDIYTFDGALNKSTVPTDFSSAKIEVSQLLKGDASLKMDKSDAVSHTGNYTCEVTELTREGETIIELKYRVVSWFSPNENILIVIFPIFAILLFWGQFGIGGGGSGGGGSGGGGSGGGGSGSMRKGEELFTGVVPILVELDGDVNGHKFSVRGEGEGDATNGKLTLKFICTTGKLPVPWPTLVTTLTYGVQCFARYPDHMKQHDFFKSAMPEGYVQERTISFKDDGTYKTRAEVKFEGDTLVNRIELKGIDFKEDGNILGHKLEYNFNSHNVYITADKQKNGIKANFKIRHNVEDGSVQLADHYQQNTPIGDGPVLLPDNHYLSTQSVLSKDPNEKRDHMVLLEFVTAAGITHGMDELYK

SEQ ID NO: 820 - DNA, 1419 bp, synthetic construct
  source 1..1419: mol_type = other DNA
atggcactccccgtaactgctctgctgctgccgttggcattgctcctgcacgccgcacgcccgctgcaaaacagaaggggattagacctgctttttcttaaagagggagggctctgtgctgccttaaaggaagaatgttgcttttatatgtggcccctggtagcggcgctgttgctgggctcggcgtgctgcggatcagctcagctactatttaataaaacaaaatctgtagaattcacgttttgtaatgacactgtcgtcattccatgctttgttactaatatggaggcacaaaacactactgaagtatacgtaaagtggaaatttaaaggaagagatatttacacctttgatggagctctaaacaagtccactgtccccactgactttagtagtgcaaaaattgaagtctcacaattactaaaaggagatgcctctttgaagatggataagagtgatgctgtctcacacacaggaaactacacttgtgaagtaacagaattaaccagagaaggtgaaacgatcatcgagctaaaatatcgtgttgtttcatggttttctccaaatgaaaatattcttattgttattttcccaatttttgctatactcctgttctggggacagtttggtattggtggtggcggttctggtggtggcggtagtggcggcggaggaagcggtggtggcggttccggatctatgcgtaaaggcgaagagctgttcactggtgtcgtccctattctggtggaactggatggtgatgtcaacggtcataagttttccgtgcgtggcgagggtgaaggtgacgcaactaatggtaaactgacgctgaagttcatctgtactactggtaaactgccggtaccttggccgactctggtaacgacgctgacttatggtgttcagtgctttgctcgttatccggaccatatgaagcagcatgacttcttcaagtccgccatgccggaaggctatgtgcaggaacgcacgatttcctttaaggatgacggcacgtacaaaacgcgtgcggaagtgaaatttgaaggcgataccctggtaaaccgcattgagctgaaaggcattgactttaaagaagacggcaatatcctgggccataagctggaatacaattttaacagccacaatgtttacatcaccgccgataaacaaaaaaatggcattaaagcgaattttaaaattcgccacaacgtggaggatggcagcgtgcagctggctgatcactaccagcaaaacactccaatcggtgatggtcctgttctgctgccagacaatcactatctgagcacgcaaagcgttctgtctaaagatccgaacgagaaacgcgatcatatggttctgctggagttcgtaaccgcagcgggcatcacgcatggtatggatgaactgtacaaatgataa

SEQ ID NO: 821 - protein, 211 aa, synthetic construct
MALPVTALLLPLALLLHAARPLQNRRGLDLLFLKEGGLCAALKEECCFYMWPLVAALLLGSACCGSAQLLFNKTKSVEFTFCNDTVVIPCFVTNMEAQNTTEVYVKWKFKGRDIYTFDGALNKSTVPTDFSSAKIEVSQLLKGDASLKMDKSDAVSHTGNYTCEVTELTREGETIIELKYRVVSWFSPNENILIVIFPIFAILLFWGQFGI

SEQ ID NO: 822 - DNA, 633 bp, synthetic construct
  source 1..633: mol_type = other DNA
atggcactccccgtaactgctctgctgctgccgttggcattgctcctgcacgccgcacgcccgctgcaaaacagaaggggattagacctgctttttcttaaagagggagggctctgtgctgccttaaaggaagaatgttgcttttatatgtggcccctggtagcggcgctgttgctgggctcggcgtgctgcggatcagctcagctactatttaataaaacaaaatctgtagaattcacgttttgtaatgacactgtcgtcattccatgctttgttactaatatggaggcacaaaacactactgaagtatacgtaaagtggaaatttaaaggaagagatatttacacctttgatggagctctaaacaagtccactgtccccactgactttagtagtgcaaaaattgaagtctcacaattactaaaaggagatgcctctttgaagatggataagagtgatgctgtctcacacacaggaaactacacttgtgaagtaacagaattaaccagagaaggtgaaacgatcatcgagctaaaatatcgtgttgtttcatggttttctccaaatgaaaatattcttattgttattttcccaatttttgctatactcctgttctggggacagtttggtatt

SEQ ID NO: 823 - protein, 513 aa, synthetic construct
MALPVTALLLPLALLLHAARPAVGIGALFLGFLGAAGWPLVAALLLGSACCGSAQLLFNKTKSVEFTFCNDTVVIPCFVTNMEAQNTTEVYVKWKFKGRDIYTFDGALNKSTVPTDFSSAKIEVSQLLKGDASLKMDKSDAVSHTGNYTCEVTELTREGETIIELKYRVVSWFSPNESTMGAASMTLTVQARQLLSGIVQQQNNLLRAIEAQQHLLQLTVWGIKQLQARILLFIMIVGGLVGLRIVFAVLSIVGGGGSGGGGSGGGGSGGGGSGSMRKGEELFTGVVPILVELDGDVNGHKFSVRGEGEGDATNGKLTLKFICTTGKLPVPWPTLVTTLTYGVQCFARYPDHMKQHDFFKSAMPEGYVQERTISFKDDGTYKTRAEVKFEGDTLVNRIELKGIDFKEDGNILGHKLEYNFNSHNVYITADKQKNGIKANFKIRHNVEDGSVQLADHYQQNTPIGDGPVLLPDNHYLSTQSVLSKDPNEKRDHMVLLEFVTAAGITHGMDELYK

SEQ ID NO: 824 - DNA, 1545 bp, synthetic construct
  source 1..1545: mol_type = other DNA
atggcactccccgtaactgctctgctgctgccgttggcattgctcctgcacgccgcacgcccggcagtgggaataggagctttgttccttgggttcttgggagcagcaggatggcccctggtagcggcgctgttgctgggctcggcgtgctgcggatcagctcagctactatttaataaaacaaaatctgtagaattcacgttttgtaatgacactgtcgtcattccatgctttgttactaatatggaggcacaaaacactactgaagtatacgtaaagtggaaatttaaaggaagagatatttacacctttgatggagctctaaacaagtccactgtccccactgactttagtagtgcaaaaattgaagtctcacaattactaaaaggagatgcctctttgaagatggataagagtgatgctgtctcacacacaggaaactacacttgtgaagtaacagaattaaccagagaaggtgaaacgatcatcgagctaaaatatcgtgttgtttcatggttttctccaaatgaaagcactatgggcgcagcctcaatgacgctgacggtacaggccagacaattattgtctggtatagtgcagcagcagaacaatttgctgagggctattgaggcgcaacagcatctgttgcaactcacagtctggggcatcaagcagctccaggcaagaatcctgttattcataatgatagtaggaggcttggtaggtttaagaatagtttttgctgtactttctatagtgggtggtggcggttctggtggtggcggtagtggcggcggaggaagcggtggtggcggttccggatctatgcgtaaaggcgaagagctgttcactggtgtcgtccctattctggtggaactggatggtgatgtcaacggtcataagttttccgtgcgtggcgagggtgaaggtgacgcaactaatggtaaactgacgctgaagttcatctgtactactggtaaactgccggtaccttggccgactctggtaacgacgctgacttatggtgttcagtgctttgctcgttatccggaccatatgaagcagcatgacttcttcaagtccgccatgccggaaggctatgtgcaggaacgcacgatttcctttaaggatgacggcacgtacaaaacgcgtgcggaagtgaaatttgaaggcgataccctggtaaaccgcattgagctgaaaggcattgactttaaagaagacggcaatatcctgggccataagctggaatacaattttaacagccacaatgtttacatcaccgccgataaacaaaaaaatggcattaaagcgaattttaaaattcgccacaacgtggaggatggcagcgtgcagctggctgatcactaccagcaaaacactccaatcggtgatggtcctgttctgctgccagacaatcactatctgagcacgcaaagcgttctgtctaaagatccgaacgagaaacgcgatcatatggttctgctggagttcgtaaccgcagcgggcatcacgcatggtatggatgaactgtacaaatgataa

SEQ ID NO: 825 - protein, 253 aa, synthetic construct
MALPVTALLLPLALLLHAARPAVGIGALFLGFLGAAGWPLVAALLLGSACCGSAQLLFNKTKSVEFTFCNDTVVIPCFVTNMEAQNTTEVYVKWKFKGRDIYTFDGALNKSTVPTDFSSAKIEVSQLLKGDASLKMDKSDAVSHTGNYTCEVTELTREGETIIELKYRVVSWFSPNESTMGAASMTLTVQARQLLSGIVQQQNNLLRAIEAQQHLLQLTVWGIKQLQARILLFIMIVGGLVGLRIVFAVLSIV

SEQ ID NO: 826 - DNA, 759 bp, synthetic construct
  source 1..759: mol_type = other DNA
atggcactccccgtaactgctctgctgctgccgttggcattgctcctgcacgccgcacgcccggcagtgggaataggagctttgttccttgggttcttgggagcagcaggatggcccctggtagcggcgctgttgctgggctcggcgtgctgcggatcagctcagctactatttaataaaacaaaatctgtagaattcacgttttgtaatgacactgtcgtcattccatgctttgttactaatatggaggcacaaaacactactgaagtatacgtaaagtggaaatttaaaggaagagatatttacacctttgatggagctctaaacaagtccactgtccccactgactttagtagtgcaaaaattgaagtctcacaattactaaaaggagatgcctctttgaagatggataagagtgatgctgtctcacacacaggaaactacacttgtgaagtaacagaattaaccagagaaggtgaaacgatcatcgagctaaaatatcgtgttgtttcatggttttctccaaatgaaagcactatgggcgcagcctcaatgacgctgacggtacaggccagacaattattgtctggtatagtgcagcagcagaacaatttgctgagggctattgaggcgcaacagcatctgttgcaactcacagtctggggcatcaagcagctccaggcaagaatcctgttattcataatgatagtaggaggcttggtaggtttaagaatagtttttgctgtactttctatagtg

SEQ ID NO: 827 - protein, 765 aa, synthetic construct
MSRSVALAVLALLSLSGLEAVMAPRTLFLGCGGSGGGGSGGGGSGGGGSIQRTPKIQVYSRHPAENGKSNFLNCYVSGFHPSDIEVDLLKNGERIEKVEHSDLSFSKDWSFYLLYYTEFTPTEKDEYACRVNHVTLSQPKIVKWDRDMGGGGSGGGGSGGGGSGGGGSGSHSLKYFHTSVSRPGRGEPRFISVGYVDDTQFVRFDNDAASPRMVPRAPWMEQEGSEYWDRETRSARDTAQIFRVNLRTLRGCYNQSEAGSHTLQWMHGCELGPDGRFLRGYEQFAYDGKDYLTLNEDLRSWTAVDTAAQISEQKSNDASEAEHQRAYLEDTCVEWLHKYLEKGKETLLHLEPPKTHVTHHPISDHEATLRCWALGFYPAEITLTWQQDGEGHTQDTELVETRPAGDGTFQKWAAVVVPSGEEQRYTCHVQHEGLPEPVTLRWKPASQPTIPIVGIIAGLVLLGSVVSGAVVAAVIWRKKSSGGKGGSYSKAEWSDSAQGSESHSLGGGGSGGGGSGGGGSGGGGSGSMRKGEELFTGVVPILVELDGDVNGHKFSVRGEGEGDATNGKLTLKFICTTGKLPVPWPTLVTTLTYGVQCFARYPDHMKQHDFFKSAMPEGYVQERTISFKDDGTYKTRAEVKFEGDTLVNRIELKGIDFKEDGNILGHKLEYNFNSHNVYITADKQKNGIKANFKIRHNVEDGSVQLADHYQQNTPIGDGPVLLPDNHYLSTQSVLSKDPNEKRDHMVLLEFVTAAGITHGMDELYK

SEQ ID NO: 828 - DNA, 2301 bp, synthetic construct
  source 1..2301: mol_type = other DNA
atgtctcgctccgtggccttagctgtgctcgcgctactctctctttctggcctggaggctgtcatggcgccccgaaccctcttcctgggttgcggcggttctggtggtggcggtagtggcggcggaggaagcggtggtggcggttccatccagcgtactccaaagattcaggtttactcacgtcatccagcagagaatggaaagtcaaatttcctgaattgctatgtgtctgggtttcatccatccgacattgaagttgacttactgaagaatggagagagaattgaaaaagtggagcattcagacttgtctttcagcaaggactggtctttctatctcttgtactacactgaatttacccccactgaaaaagatgagtatgcctgccgtgtgaaccatgtgactttgtcacagcccaagatagttaagtgggatcgagacatgggtggtggcggttctggtggtggcggtagtggcggcggaggaagcggtggtggcggttccggctcccactccttgaagtatttccacacttccgtgtcccggcccggccgcggggagccccgcttcatctctgtgggctacgtggacgacacccagttcgtgcgcttcgacaacgacgccgcgagtccgaggatggtgccgcgggcgccgtggatggagcaggaggggtcagagtattgggaccgggagacacggagcgccagggacaccgcacagattttccgagtgaatctgcggacgctgcgcggctgctacaatcagagcgaggccgggtctcacaccctgcagtggatgcatggctgcgagctggggcccgacgggcgcttcctccgcgggtatgaacagttcgcctacgacggcaaggattatctcaccctgaatgaggacctgcgctcctggaccgcggtggacacggcggctcagatctccgagcaaaagtcaaatgatgcctctgaggcggagcaccagagagcctacctggaagacacatgcgtggagtggctccacaaatacctggagaaggggaaggagacgctgcttcacctggagcccccaaagacacacgtgactcaccaccccatctctgaccatgaggccaccctgaggtgctgggccctgggcttctaccctgcggagatcacactgacctggcagcaggatggggagggccatacccaggacacggagctcgtggagaccaggcctgcaggggatggaaccttccagaagtgggcagctgtggtggtgccttctggagaggagcagagatacacgtgccatgtgcagcatgaggggctacccgagcccgtcaccctgagatggaagccggcttcccagcccaccatccccatcgtgggcatcattgctggcctggttctccttggatctgtggtctctggagctgtggttgctgctgtgatatggaggaagaagagctcaggtggaaaaggagggagctactctaaggctgagtggagcgacagtgcccaggggtctgagtctcacagcttgggtggtggcggttctggtggtggcggtagtggcggcggaggaagcggtggtggcggttccggatctatgcgtaaaggcgaagagctgttcactggtgtcgtccctattctggtggaactggatggtgatgtcaacggtcataagttttccgtgcgtggcgagggtgaaggtgacgcaactaatggtaaactgacgctgaagttcatctgtactactggtaaactgccggtaccttggccgactctggtaacgacgctgacttatggtgttcagtgctttgctcgttatccggaccatatgaagcagcatgacttcttcaagtccgccatgccggaaggctatgtgcaggaacgcacgatttcctttaaggatgacggcacgtacaaaacgcgtgcggaagtgaaatttgaaggcgataccctggtaaaccgcattgagctgaaaggcattgactttaaagaagacggcaatatcctgggccataagctggaatacaattttaacagccacaatgtttacatcaccgccgataaacaaaaaaatggcattaaagcgaattttaaaattcgccacaacgtggaggatggcagcgtgcagctggctgatcactaccagcaaaacactccaatcggtgatggtcctgttctgctgccagacaatcactatctgagcacgcaaagcgttctgtctaaagatccgaacgagaaacgcgatcatatggttctgctggagttcgtaaccgcagcgggcatcacgcatggtatggatgaactgtacaaatgataa

SEQ ID NO: 829 - protein, 505 aa, synthetic construct
MSRSVALAVLALLSLSGLEAVMAPRTLFLGCGGSGGGGSGGGGSGGGGSIQRTPKIQVYSRHPAENGKSNFLNCYVSGFHPSDIEVDLLKNGERIEKVEHSDLSFSKDWSFYLLYYTEFTPTEKDEYACRVNHVTLSQPKIVKWDRDMGGGGSGGGGSGGGGSGGGGSGSHSLKYFHTSVSRPGRGEPRFISVGYVDDTQFVRFDNDAASPRMVPRAPWMEQEGSEYWDRETRSARDTAQIFRVNLRTLRGCYNQSEAGSHTLQWMHGCELGPDGRFLRGYEQFAYDGKDYLTLNEDLRSWTAVDTAAQISEQKSNDASEAEHQRAYLEDTCVEWLHKYLEKGKETLLHLEPPKTHVTHHPISDHEATLRCWALGFYPAEITLTWQQDGEGHTQDTELVETRPAGDGTFQKWAAVVVPSGEEQRYTCHVQHEGLPEPVTLRWKPASQPTIPIVGIIAGLVLLGSVVSGAVVAAVIWRKKSSGGKGGSYSKAEWSDSAQGSESHSL

SEQ ID NO: 830 - DNA, 1515 bp, synthetic construct
  source 1..1515: mol_type = other DNA
atgtctcgctccgtggccttagctgtgctcgcgctactctctctttctggcctggaggctgtcatggcgccccgaaccctcttcctgggttgcggcggttctggtggtggcggtagtggcggcggaggaagcggtggtggcggttccatccagcgtactccaaagattcaggtttactcacgtcatccagcagagaatggaaagtcaaatttcctgaattgctatgtgtctgggtttcatccatccgacattgaagttgacttactgaagaatggagagagaattgaaaaagtggagcattcagacttgtctttcagcaaggactggtctttctatctcttgtactacactgaatttacccccactgaaaaagatgagtatgcctgccgtgtgaaccatgtgactttgtcacagcccaagatagttaagtgggatcgagacatgggtggtggcggttctggtggtggcggtagtggcggcggaggaagcggtggtggcggttccggctcccactccttgaagtatttccacacttccgtgtcccggcccggccgcggggagccccgcttcatctctgtgggctacgtggacgacacccagttcgtgcgcttcgacaacgacgccgcgagtccgaggatggtgccgcgggcgccgtggatggagcaggaggggtcagagtattgggaccgggagacacggagcgccagggacaccgcacagattttccgagtgaatctgcggacgctgcgcggctgctacaatcagagcgaggccgggtctcacaccctgcagtggatgcatggctgcgagctggggcccgacgggcgcttcctccgcgggtatgaacagttcgcctacgacggcaaggattatctcaccctgaatgaggacctgcgctcctggaccgcggtggacacggcggctcagatctccgagcaaaagtcaaatgatgcctctgaggcggagcaccagagagcctacctggaagacacatgcgtggagtggctccacaaatacctggagaaggggaaggagacgctgcttcacctggagcccccaaagacacacgtgactcaccaccccatctctgaccatgaggccaccctgaggtgctgggccctgggcttctaccctgcggagatcacactgacctggcagcaggatggggagggccatacccaggacacggagctcgtggagaccaggcctgcaggggatggaaccttccagaagtgggcagctgtggtggtgccttctggagaggagcagagatacacgtgccatgtgcagcatgaggggctacccgagcccgtcaccctgagatggaagccggcttcccagcccaccatccccatcgtgggcatcattgctggcctggttctccttggatctgtggtctctggagctgtggttgctgctgtgatatggaggaagaagagctcaggtggaaaaggagggagctactctaaggctgagtggagcgacagtgcccaggggtctgagtctcacagcttg

SEQ ID NO: 831 - protein, 591 aa, synthetic construct
MALPVTALLLPLALLLHAARPQVQLVESEGGLVQPGGSLRLSCAASGFTFSSYEMNWVRQAPGKGLEWVSYISSSGSTIYYADSVKGRFTISRDNAKNSLYLQMNSLRAEDTAVYYCAREAKGYYYGMDVWGQGTTVTVSSGGGGSGGGGSGGGGSQPVLTQSPSVSVSPGQTASITCSGDKLGDTYACWYQQKPGQSPVLVIYQDTKRPSGIPERFSGSNSGNTATLTISGTQAMDEADYYCQAWDSSTVVFGGGTKLTVLTTTPAPRPPTPAPTIASQPLSLRPEACRPAAGGAVHTRGLDFACDIYIWAPLAGTCGVLLLSLVITLYCGGGGSGGGGSGGGGSGGGGSGSMRKGEELFTGVVPILVELDGDVNGHKFSVRGEGEGDATNGKLTLKFICTTGKLPVPWPTLVTTLTYGVQCFARYPDHMKQHDFFKSAMPEGYVQERTISFKDDGTYKTRAEVKFEGDTLVNRIELKGIDFKEDGNILGHKLEYNFNSHNVYITADKQKNGIKANFKIRHNVEDGSVQLADHYQQNTPIGDGPVLLPDNHYLSTQSVLSKDPNEKRDHMVLLEFVTAAGITHGMDELYK

SEQ ID NO: 832 - DNA, 1779 bp, synthetic construct
  source 1..1779: mol_type = other DNA
atggcactccccgtaactgctctgctgctgccgttggcattgctcctgcacgccgcacgcccgcaggtgcagctggtggagtctgagggaggcttggtacagcctggagggtccctgagactctcctgtgcagcctctggattcaccttcagtagttatgaaatgaactgggtccgccaggctccagggaaggggctggagtgggtttcatacattagtagtagtggtagtaccatatactacgcagactctgtgaagggccgattcaccatctccagagacaacgccaagaactcactgtatctgcaaatgaacagcctgagagccgaggacacggctgtttattactgtgcgagagaggccaaggggtactactacggtatggacgtctggggccaagggaccacggtcaccgtctcgagtggtggtggcggatccggtggtggcggttctggtggtggcggctcccagcctgtgctgactcagtcaccctcagtgtccgtgtccccaggacagacagccagcatcacctgctctggagataaattgggggatacatatgcttgctggtatcagcagaagccaggccagtcccctgtgctggtcatctatcaagataccaagcggccctcagggatccctgagcgattctctggctccaactctgggaacacagccactctgaccatcagcgggacccaggctatggatgaggctgactattactgtcaggcgtgggacagcagcactgtggtattcggcggagggaccaagctgaccgtcctaaccacgacgccagcgccgcgaccaccaacaccggcgcccaccatcgcgtcgcagcccctgtccctgcgcccagaggcgtgccggccagcggcggggggcgcagtgcacacgagggggctggacttcgcctgtgatatctacatctgggcgcccttggccgggacttgtggggtccttctcctgtcactggttatcaccctttactgcggtggtggcggttctggtggtggcggtagtggcggcggaggaagcggtggtggcggttccggatctatgcgtaaaggcgaagagctgttcactggtgtcgtccctattctggtggaactggatggtgatgtcaacggtcataagttttccgtgcgtggcgagggtgaaggtgacgcaactaatggtaaactgacgctgaagttcatctgtactactggtaaactgccggtaccttggccgactctggtaacgacgctgacttatggtgttcagtgctttgctcgttatccggaccatatgaagcagcatgacttcttcaagtccgccatgccggaaggctatgtgcaggaacgcacgatttcctttaaggatgacggcacgtacaaaacgcgtgcggaagtgaaatttgaaggcgataccctggtaaaccgcattgagctgaaaggcattgactttaaagaagacggcaatatcctgggccataagctggaatacaattttaacagccacaatgtttacatcaccgccgataaacaaaaaaatggcattaaagcgaattttaaaattcgccacaacgtggaggatggcagcgtgcagctggctgatcactaccagcaaaacactccaatcggtgatggtcctgttctgctgccagacaatcactatctgagcacgcaaagcgttctgtctaaagatccgaacgagaaacgcgatcatatggttctgctggagttcgtaaccgcagcgggcatcacgcatggtatggatgaactgtacaaatgataa

SEQ ID NO: 833 - protein, 331 aa, synthetic construct
MALPVTALLLPLALLLHAARPQVQLVESEGGLVQPGGSLRLSCAASGFTFSSYEMNWVRQAPGKGLEWVSYISSSGSTIYYADSVKGRFTISRDNAKNSLYLQMNSLRAEDTAVYYCAREAKGYYYGMDVWGQGTTVTVSSGGGGSGGGGSGGGGSQPVLTQSPSVSVSPGQTASITCSGDKLGDTYACWYQQKPGQSPVLVIYQDTKRPSGIPERFSGSNSGNTATLTISGTQAMDEADYYCQAWDSSTVVFGGGTKLTVLTTTPAPRPPTPAPTIASQPLSLRPEACRPAAGGAVHTRGLDFACDIYIWAPLAGTCGVLLLSLVITLYC

SEQ ID NO: 834 - DNA, 993 bp, synthetic construct
  source 1..993: mol_type = other DNA
atggcactccccgtaactgctctgctgctgccgttggcattgctcctgcacgccgcacgcccgcaggtgcagctggtggagtctgagggaggcttggtacagcctggagggtccctgagactctcctgtgcagcctctggattcaccttcagtagttatgaaatgaactgggtccgccaggctccagggaaggggctggagtgggtttcatacattagtagtagtggtagtaccatatactacgcagactctgtgaagggccgattcaccatctccagagacaacgccaagaactcactgtatctgcaaatgaacagcctgagagccgaggacacggctgtttattactgtgcgagagaggccaaggggtactactacggtatggacgtctggggccaagggaccacggtcaccgtctcgagtggtggtggcggatccggtggtggcggttctggtggtggcggctcccagcctgtgctgactcagtcaccctcagtgtccgtgtccccaggacagacagccagcatcacctgctctggagataaattgggggatacatatgcttgctggtatcagcagaagccaggccagtcccctgtgctggtcatctatcaagataccaagcggccctcagggatccctgagcgattctctggctccaactctgggaacacagccactctgaccatcagcgggacccaggctatggatgaggctgactattactgtcaggcgtgggacagcagcactgtggtattcggcggagggaccaagctgaccgtcctaaccacgacgccagcgccgcgaccaccaacaccggcgcccaccatcgcgtcgcagcccctgtccctgcgcccagaggcgtgccggccagcggcggggggcgcagtgcacacgagggggctggacttcgcctgtgatatctacatctgggcgcccttggccgggacttgtggggtccttctcctgtcactggttatcaccctttactgc

SEQ ID NO: 835 - protein, 724 aa, synthetic construct
MALPVTALLLPLALLLHAARPDYSPSCCTLTIGVSSYHSKPCNPAQPVCSWTLDLLALSADQALQPPCPNLVSYSSYHATYSLYLFPHWTKKPNRNGGGYYSASYSDPCSLKCPYLGCQSWTCPYTGAVSSPYWKFQHDVNFTQEVSRLNINLHFSKCGFPFSLLVDAPGYDPIWFLNTEPSQLPPTAPPLLPHSNLDHILEPSIPWKSKLLTLVQLTLQSTNYTCIVCIDRASLSTWHVLYSPNVSVPSSSSTPLLYPSLALPAPHLTLPFNWTHCFDPQIQAIVSSPCHNSLILPPFSLSPVPTLGSRSRRAVPVAVWLVSALAMGAGVAGGITGSMSLASGKSLLHEVDKDISQLTQAIVKNHKNLLKIAQYAAQNRRGLDLLFWEQGGLCKALQEQCRFPNITNSHVPILQERPPLENRVLTGWGLNWDLGLSQWAREALQTGITLVALLLLVILAGPCIGGGGSGGGGSGGGGSGGGGSGSMRKGEELFTGVVPILVELDGDVNGHKFSVRGEGEGDATNGKLTLKFICTTGKLPVPWPTLVTTLTYGVQCFARYPDHMKQHDFFKSAMPEGYVQERTISFKDDGTYKTRAEVKFEGDTLVNRIELKGIDFKEDGNILGHKLEYNFNSHNVYITADKQKNGIKANFKIRHNVEDGSVQLADHYQQNTPIGDGPVLLPDNHYLSTQSVLSKDPNEKRDHMVLLEFVTAAGITHGMDELYK

SEQ ID NO: 836 - DNA, 2178 bp, synthetic construct
  source 1..2178: mol_type = other DNA
atggcactccccgtaactgctctgctgctgccgttggcattgctcctgcacgccgcacgcccggattacagccccagctgctgtactctcacaattggagtctcctcataccactctaaaccctgcaatcctgcccagccagtttgttcgtggaccctcgacctgctggccctttcagcagatcaggccctacagcccccctgccctaacctagtaagttactccagctaccatgccacctattccctatatctattccctcattggactaagaagccaaaccgaaatggcggaggctattattcagcctcttattcagacccttgttccttaaagtgcccatacctggggtgccaatcatggacctgcccctatacaggagccgtctccagcccctactggaagtttcaacacgatgtcaattttactcaagaagtttcacgcctcaatattaatctccatttttcaaaatgcggttttcccttctcccttctagtcgacgctccaggatatgaccccatctggttccttaataccgaacccagccaactgcctcccaccgcccctcctctactcccccactctaacctagaccacatcctcgagccctctataccatggaaatcaaaactcctgacccttgtccagttaaccctacaaagcactaattatacttgcattgtctgtatcgatcgtgccagcctctccacttggcacgtcctatactctcccaacgtctctgttccatcctcttcttctacccccctcctttacccatcgttagcgcttccagccccccacctgacgttaccatttaactggacccactgctttgacccccagattcaagctatagtctcctccccctgtcataactccctcatcctgccccccttttccttgtcacctgttcccaccctaggatcccgctcccgccgagcggtaccggtggcggtctggcttgtctccgccctggccatgggagccggagtggctggcgggattaccggctccatgtccctcgcctcaggaaagagcctcctacatgaggtggacaaagatatttcccagttaactcaagcaatagtcaaaaaccacaaaaatctactcaaaattgcgcagtatgctgcccagaacagacgaggccttgatctcctgttctgggagcaaggaggattatgcaaagcattacaagaacagtgccgttttccgaatattaccaattcccatgtcccaatactacaagaaagacccccccttgagaatcgagtcctgactggctggggccttaactgggaccttggcctctcacagtgggctcgagaggccttacaaactggaatcacccttgttgcgctactccttcttgttatccttgcaggaccatgcatcggtggtggcggttctggtggtggcggtagtggcggcggaggaagcggtggtggcggttccggatctatgcgtaaaggcgaagagctgttcactggtgtcgtccctattctggtggaactggatggtgatgtcaacggtcataagttttccgtgcgtggcgagggtgaaggtgacgcaactaatggtaaactgacgctgaagttcatctgtactactggtaaactgccggtaccttggccgactctggtaacgacgctgacttatggtgttcagtgctttgctcgttatccggaccatatgaagcagcatgacttcttcaagtccgccatgccggaaggctatgtgcaggaacgcacgatttcctttaaggatgacggcacgtacaaaacgcgtgcggaagtgaaatttgaaggcgataccctggtaaaccgcattgagctgaaaggcattgactttaaagaagacggcaatatcctgggccataagctggaatacaattttaacagccacaatgtttacatcaccgccgataaacaaaaaaatggcattaaagcgaattttaaaattcgccacaacgtggaggatggcagcgtgcagctggctgatcactaccagcaaaacactccaatcggtgatggtcctgttctgctgccagacaatcactatctgagcacgcaaagcgttctgtctaaagatccgaacgagaaacgcgatcatatggttctgctggagttcgtaaccgcagcgggcatcacgcatggtatggatgaactgtacaaatgataa

SEQ ID NO: 837 - protein, 464 aa, synthetic construct
MALPVTALLLPLALLLHAARPDYSPSCCTLTIGVSSYHSKPCNPAQPVCSWTLDLLALSADQALQPPCPNLVSYSSYHATYSLYLFPHWTKKPNRNGGGYYSASYSDPCSLKCPYLGCQSWTCPYTGAVSSPYWKFQHDVNFTQEVSRLNINLHFSKCGFPFSLLVDAPGYDPIWFLNTEPSQLPPTAPPLLPHSNLDHILEPSIPWKSKLLTLVQLTLQSTNYTCIVCIDRASLSTWHVLYSPNVSVPSSSSTPLLYPSLALPAPHLTLPFNWTHCFDPQIQAIVSSPCHNSLILPPFSLSPVPTLGSRSRRAVPVAVWLVSALAMGAGVAGGITGSMSLASGKSLLHEVDKDISQLTQAIVKNHKNLLKIAQYAAQNRRGLDLLFWEQGGLCKALQEQCRFPNITNSHVPILQERPPLENRVLTGWGLNWDLGLSQWAREALQTGITLVALLLLVILAGPCI

SEQ ID NO: 838 - DNA, 1392 bp, synthetic construct
  source 1..1392: mol_type = other DNA
atggcactccccgtaactgctctgctgctgccgttggcattgctcctgcacgccgcacgcccggattacagccccagctgctgtactctcacaattggagtctcctcataccactctaaaccctgcaatcctgcccagccagtttgttcgtggaccctcgacctgctggccctttcagcagatcaggccctacagcccccctgccctaacctagtaagttactccagctaccatgccacctattccctatatctattccctcattggactaagaagccaaaccgaaatggcggaggctattattcagcctcttattcagacccttgttccttaaagtgcccatacctggggtgccaatcatggacctgcccctatacaggagccgtctccagcccctactggaagtttcaacacgatgtcaattttactcaagaagtttcacgcctcaatattaatctccatttttcaaaatgcggttttcccttctcccttctagtcgacgctccaggatatgaccccatctggttccttaataccgaacccagccaactgcctcccaccgcccctcctctactcccccactctaacctagaccacatcctcgagccctctataccatggaaatcaaaactcctgacccttgtccagttaaccctacaaagcactaattatacttgcattgtctgtatcgatcgtgccagcctctccacttggcacgtcctatactctcccaacgtctctgttccatcctcttcttctacccccctcctttacccatcgttagcgcttccagccccccacctgacgttaccatttaactggacccactgctttgacccccagattcaagctatagtctcctccccctgtcataactccctcatcctgccccccttttccttgtcacctgttcccaccctaggatcccgctcccgccgagcggtaccggtggcggtctggcttgtctccgccctggccatgggagccggagtggctggcgggattaccggctccatgtccctcgcctcaggaaagagcctcctacatgaggtggacaaagatatttcccagttaactcaagcaatagtcaaaaaccacaaaaatctactcaaaattgcgcagtatgctgcccagaacagacgaggccttgatctcctgttctgggagcaaggaggattatgcaaagcattacaagaacagtgccgttttccgaatattaccaattcccatgtcccaatactacaagaaagacccccccttgagaatcgagtcctgactggctggggccttaactgggaccttggcctctcacagtgggctcgagaggccttacaaactggaatcacccttgttgcgctactccttcttgttatccttgcaggaccatgcatc

SEQ ID NO: 839 - protein, 432 aa, synthetic construct
MALPVTALLLPLALLLHAARPAVPVAVWLVSALAMGAGVAGGITGSMSLASGKSLLHEVDKDISQLTQAIVKNHKNLLKIAQYAAQNRRGLDLLFWEQGGLCKALQEQCRFPNITNSHVPILQERPPLENRVLTGWGLNWDLGLSQWAREALQTGITLVALLLLVILAGPCIGGGGSGGGGSGGGGSGGGGSGSMRKGEELFTGVVPILVELDGDVNGHKFSVRGEGEGDATNGKLTLKFICTTGKLPVPWPTLVTTLTYGVQCFARYPDHMKQHDFFKSAMPEGYVQERTISFKDDGTYKTRAEVKFEGDTLVNRIELKGIDFKEDGNILGHKLEYNFNSHNVYITADKQKNGIKANFKIRHNVEDGSVQLADHYQQNTPIGDGPVLLPDNHYLSTQSVLSKDPNEKRDHMVLLEFVTAAGITHGMDELYK

SEQ ID NO: 840 - DNA, 1302 bp, synthetic construct
  source 1..1302: mol_type = other DNA
atggcactccccgtaactgctctgctgctgccgttggcattgctcctgcacgccgcacgcccggcggtaccggtggcggtctggcttgtctccgccctggccatgggagccggagtggctggcgggattaccggctccatgtccctcgcctcaggaaagagcctcctacatgaggtggacaaagatatttcccagttaactcaagcaatagtcaaaaaccacaaaaatctactcaaaattgcgcagtatgctgcccagaacagacgaggccttgatctcctgttctgggagcaaggaggattatgcaaagcattacaagaacagtgccgttttccgaatattaccaattcccatgtcccaatactacaagaaagacccccccttgagaatcgagtcctgactggctggggccttaactgggaccttggcctctcacagtgggctcgagaggccttacaaactggaatcacccttgttgcgctactccttcttgttatccttgcaggaccatgcatcggtggtggcggttctggtggtggcggtagtggcggcggaggaagcggtggtggcggttccggatctatgcgtaaaggcgaagagctgttcactggtgtcgtccctattctggtggaactggatggtgatgtcaacggtcataagttttccgtgcgtggcgagggtgaaggtgacgcaactaatggtaaactgacgctgaagttcatctgtactactggtaaactgccggtaccttggccgactctggtaacgacgctgacttatggtgttcagtgctttgctcgttatccggaccatatgaagcagcatgacttcttcaagtccgccatgccggaaggctatgtgcaggaacgcacgatttcctttaaggatgacggcacgtacaaaacgcgtgcggaagtgaaatttgaaggcgataccctggtaaaccgcattgagctgaaaggcattgactttaaagaagacggcaatatcctgggccataagctggaatacaattttaacagccacaatgtttacatcaccgccgataaacaaaaaaatggcattaaagcgaattttaaaattcgccacaacgtggaggatggcagcgtgcagctggctgatcactaccagcaaaacactccaatcggtgatggtcctgttctgctgccagacaatcactatctgagcacgcaaagcgttctgtctaaagatccgaacgagaaacgcgatcatatggttctgctggagttcgtaaccgcagcgggcatcacgcatggtatggatgaactgtacaaatgataa

SEQ ID NO: 841 - protein, 172 aa, synthetic construct
MALPVTALLLPLALLLHAARPAVPVAVWLVSALAMGAGVAGGITGSMSLASGKSLLHEVDKDISQLTQAIVKNHKNLLKIAQYAAQNRRGLDLLFWEQGGLCKALQEQCRFPNITNSHVPILQERPPLENRVLTGWGLNWDLGLSQWAREALQTGITLVALLLLVILAGPCI

SEQ ID NO: 842 - DNA, 516 bp, synthetic construct
  source 1..516: mol_type = other DNA
atggcactccccgtaactgctctgctgctgccgttggcattgctcctgcacgccgcacgcccggcggtaccggtggcggtctggcttgtctccgccctggccatgggagccggagtggctggcgggattaccggctccatgtccctcgcctcaggaaagagcctcctacatgaggtggacaaagatatttcccagttaactcaagcaatagtcaaaaaccacaaaaatctactcaaaattgcgcagtatgctgcccagaacagacgaggccttgatctcctgttctgggagcaaggaggattatgcaaagcattacaagaacagtgccgttttccgaatattaccaattcccatgtcccaatactacaagaaagacccccccttgagaatcgagtcctgactggctggggccttaactgggaccttggcctctcacagtgggctcgagaggccttacaaactggaatcacccttgttgcgctactccttcttgttatccttgcaggaccatgcatc

SEQ ID NO: 843 - protein, 732 aa, synthetic construct
MALPVTALLLPLALLLHAARPGQIVTFFQEVPHVIEEVMNIVLIALSILAILKGLYNVATCGLIGLVTFLLLSGRSCSLIYKGTYELQTLELNMETLNMTMPLSCTKNNSHHYIRVGNETGLELTLTNTSILNHKFCNLSDAHKRNLYDHSLMSIISTFHLSIPNFNQYEAMSCDFNGGKITVQYNLSHSFAVDAAGHCGTLANGVLQTFMRMAWGGSYIALDSGRGNWDCIMTSYQYLIIQNTTWDDHCQFSRPSPIGYLGLLSQRTRDIYISRRLLGTFTWTLSDSEGKDTPGGYCLTRWMLIEAELKCFGNTAVAKCNEKHDEEFCDMLRLFDFNKQAIRRLKTEAQMSIQLINKAVNALINDQLIMKNHLRDIMGIPYCNYSRYWYLNHTSTGKTSLPRCWLISNGSYLNETKFSDDIEQQADNMITEMLQKEYIDRQGKTPLGLVDLFVFSTSFYLISIFLHLVKIPGGGGSGGGGSGGGGSGGGGSGSMRKGEELFTGVVPILVELDGDVNGHKFSVRGEGEGDATNGKLTLKFICTTGKLPVPWPTLVTTLTYGVQCFARYPDHMKQHDFFKSAMPEGYVQERTISFKDDGTYKTRAEVKFEGDTLVNRIELKGIDFKEDGNILGHKLEYNFNSHNVYITADKQKNGIKANFKIRHNVEDGSVQLADHYQQNTPIGDGPVLLPDNHYLSTQSVLSKDPNEKRDHMVLLEFVTAAGITHGMDELYK

SEQ ID NO: 844 - DNA, 2202 bp, synthetic construct
  source 1..2202: mol_type = other DNA
atggcactccccgtaactgctctgctgctgccgttggcattgctcctgcacgccgcacgcccgggacagattgtgacattcttccaagaagttcctcatgttattgaggaagtgatgaatattgtccttattgcactatccatcctagcaattctgaagggactatacaatgttgccacgtgtggcttgatagggcttgtcacattccttctactttcaggaaggtcatgctcactgatctacaaagggacttacgagctgcaaacccttgagttgaatatggagactcttaatatgaccatgccgctatcctgcacaaagaacaacagtcatcattatataagggtggggaatgagacaggacttgagctcaccttgaccaacaccagcattcttaatcacaaattctgtaacctctctgatgcccacaaaaggaatctttatgatcacagcctcatgagtatcatctctacctttcatctgtccattcccaacttcaatcaatatgaggcaatgagctgcgatttcaatggggggaaaatcactgtgcaatacaacctgagtcatagcttcgcagtggatgcagcaggtcactgcggcacacttgcaaatggtgtcttacaaacatttatgagaatggcttggggagggagttatattgctcttgattctggacgcggtaactgggactgtataatgaccagttaccaatatctaatcattcagaatacaacctgggatgaccactgccaattttccagaccatcacctattggctaccttgggcttctctcacaaagaactagagacatatacattagcagaaggttgttggggacattcacctggacactatcagactcagagggaaaagacacaccagggggatactgccttactagatggatgttgattgaggccgaattaaagtgctttggaaacactgcagtagccaagtgcaatgagaaacatgatgaagaattttgtgacatgctaaggttgttcgatttcaacaaacaggccataaggaggctcaaaacagaggcccaaatgagcatacagctgatcaacaaggctgtcaatgctttaataaatgatcagctcatcatgaagaaccacttgagagacatcatgggcataccatattgtaactacagcagatattggtaccttaaccacacatcaacaggaaagacctcactaccaaggtgttggcttatctcaaatggatcatatctcaatgagaccaagttttcagatgacatcgaacaacaagctgacaacatgataacagagatgctacaaaaggaatacatagatagacagggcaaaactccactggggttagttgacctatttgtttttagcacaagtttctatctgataagcatctttctccacctggtcaaaataccaggtggtggcggttctggtggtggcggtagtggcggcggaggaagcggtggtggcggttccggatctatgcgtaaaggcgaagagctgttcactggtgtcgtccctattctggtggaactggatggtgatgtcaacggtcataagttttccgtgcgtggcgagggtgaaggtgacgcaactaatggtaaactgacgctgaagttcatctgtactactggtaaactgccggtaccttggccgactctggtaacgacgctgacttatggtgttcagtgctttgctcgttatccggaccatatgaagcagcatgacttcttcaagtccgccatgccggaaggctatgtgcaggaacgcacgatttcctttaaggatgacggcacgtacaaaacgcgtgcggaagtgaaatttgaaggcgataccctggtaaaccgcattgagctgaaaggcattgactttaaagaagacggcaatatcctgggccataagctggaatacaattttaacagccacaatgtttacatcaccgccgataaacaaaaaaatggcattaaagcgaattttaaaattcgccacaacgtggaggatggcagcgtgcagctggctgatcactaccagcaaaacactccaatcggtgatggtcctgttctgctgccagacaatcactatctgagcacgcaaagcgttctgtctaaagatccgaacgagaaacgcgatcatatggttctgctggagttcgtaaccgcagcgggcatcacgcatggtatggatgaactgtacaaatgataa

SEQ ID NO: 845 - protein, 472 aa, synthetic construct
MALPVTALLLPLALLLHAARPGQIVTFFQEVPHVIEEVMNIVLIALSILAILKGLYNVATCGLIGLVTFLLLSGRSCSLIYKGTYELQTLELNMETLNMTMPLSCTKNNSHHYIRVGNETGLELTLTNTSILNHKFCNLSDAHKRNLYDHSLMSIISTFHLSIPNFNQYEAMSCDFNGGKITVQYNLSHSFAVDAAGHCGTLANGVLQTFMRMAWGGSYIALDSGRGNWDCIMTSYQYLIIQNTTWDDHCQFSRPSPIGYLGLLSQRTRDIYISRRLLGTFTWTLSDSEGKDTPGGYCLTRWMLIEAELKCFGNTAVAKCNEKHDEEFCDMLRLFDFNKQAIRRLKTEAQMSIQLINKAVNALINDQLIMKNHLRDIMGIPYCNYSRYWYLNHTSTGKTSLPRCWLISNGSYLNETKFSDDIEQQADNMITEMLQKEYIDRQGKTPLGLVDLFVFSTSFYLISIFLHLVKIP

SEQ ID NO: 846 - DNA, 1416 bp, synthetic construct
  source 1..1416: mol_type = other DNA
atggcactccccgtaactgctctgctgctgccgttggcattgctcctgcacgccgcacgcccgggacagattgtgacattcttccaagaagttcctcatgttattgaggaagtgatgaatattgtccttattgcactatccatcctagcaattctgaagggactatacaatgttgccacgtgtggcttgatagggcttgtcacattccttctactttcaggaaggtcatgctcactgatctacaaagggacttacgagctgcaaacccttgagttgaatatggagactcttaatatgaccatgccgctatcctgcacaaagaacaacagtcatcattatataagggtggggaatgagacaggacttgagctcaccttgaccaacaccagcattcttaatcacaaattctgtaacctctctgatgcccacaaaaggaatctttatgatcacagcctcatgagtatcatctctacctttcatctgtccattcccaacttcaatcaatatgaggcaatgagctgcgatttcaatggggggaaaatcactgtgcaatacaacctgagtcatagcttcgcagtggatgcagcaggtcactgcggcacacttgcaaatggtgtcttacaaacatttatgagaatggcttggggagggagttatattgctcttgattctggacgcggtaactgggactgtataatgaccagttaccaatatctaatcattcagaatacaacctgggatgaccactgccaattttccagaccatcacctattggctaccttgggcttctctcacaaagaactagagacatatacattagcagaaggttgttggggacattcacctggacactatcagactcagagggaaaagacacaccagggggatactgccttactagatggatgttgattgaggccgaattaaagtgctttggaaacactgcagtagccaagtgcaatgagaaacatgatgaagaattttgtgacatgctaaggttgttcgatttcaacaaacaggccataaggaggctcaaaacagaggcccaaatgagcatacagctgatcaacaaggctgtcaatgctttaataaatgatcagctcatcatgaagaaccacttgagagacatcatgggcataccatattgtaactacagcagatattggtaccttaaccacacatcaacaggaaagacctcactaccaaggtgttggcttatctcaaatggatcatatctcaatgagaccaagttttcagatgacatcgaacaacaagctgacaacatgataacagagatgctacaaaaggaatacatagatagacagggcaaaactccactggggttagttgacctatttgtttttagcacaagtttctatctgataagcatctttctccacctggtcaaaatacca

SEQ ID NO: 847 - protein, 920 aa, synthetic construct
MALPVTALLLPLALLLHAARPMPLGVVTNSTLEVTEIDQLVCKDHLASTDQLKSVGLNLEGSGVSTDIPSATKRWGFRSGVPPKVVSYEAGEWAENCYNLEIKKPDGSECLPPPPDGVRGFPRCRYVHKAQGTGPCPGDYAFHKDGAFFLYDRLASTVIYRGVNFAEGVIAFLILAKPKETFLQSPPIREAVNYTENTSSYYATSYLEYEIENFGAQHSTTLFKIDNNTFVRLDRPHTPQFLFQLNDTIHLHQQLSNTTGRLIWTLDANINADIGEWAFWENKKNLSEQLRGEELSFEALSLNETEDDDAASSRITKGRISDRATRKYSDLVPKNSPGMVPLHIPEGETTLPSQNSTEGRRVGVNTQETITETAATIIGTNGNHMQISTIGIRPSSSQIPSSSPTTAPSPEAQTPTTHTSGPSVMATEEPTTPPGSSPGPTTEAPTLTTPENITTAVKTVLPQESTSNGLITSTVTGILGSLGLRKRSRRQTNTKATGKCNPNLHYWTAQEQHNAAGIAWIPYFGPGAEGIYTEGLMHNQNALVCGLRQLANETTQALQLFLRATTELRTYTILNRKAIDFLLRRWGGTCRILGPDCCIEPHDWTKNITDKINQIIHDFIDNPLPNQDNDDNWWTGWRQWIPAGIGITGIIIAIIALLCVGGGGSGGGGSGGGGSGGGGSGSMRKGEELFTGVVPILVELDGDVNGHKFSVRGEGEGDATNGKLTLKFICTTGKLPVPWPTLVTTLTYGVQCFARYPDHMKQHDFFKSAMPEGYVQERTISFKDDGTYKTRAEVKFEGDTLVNRIELKGIDFKEDGNILGHKLEYNFNSHNVYITADKQKNGIKANFKIRHNVEDGSVQLADHYQQNTPIGDGPVLLPDNHYLSTQSVLSKDPNEKRDHMVLLEFVTAAGITHGMDELYK

SEQ ID NO: 848 - DNA, 2766 bp, synthetic construct
  source 1..2766: mol_type = other DNA
atggcactccccgtaactgctctgctgctgccgttggcattgctcctgcacgccgcacgcccgatgcctttgggtgttgtgactaacagcactttagaagtaacagagattgaccagctagtctgcaaggatcatcttgcatctactgaccagctgaaatcagttggtctcaacctcgaggggagcggagtatctactgatatcccatctgcaacaaagcgttggggcttcagatctggtgttcctcccaaggtggtcagctatgaagcgggagaatgggctgaaaattgctacaatcttgaaataaagaagccggacgggagcgaatgcttacccccaccgccagatggtgtcagaggctttccaaggtgccgctatgtgcacaaagcccaaggaaccgggccctgcccaggtgactacgcctttcacaaggatggagctttctttctctatgacaggctggcttcaactgtaatttacagaggagtcaattttgctgagggggtgattgcattcttgatattggctaaaccaaaagaaacgttccttcagtcaccccccattcgagaggcagtaaactacactgaaaatacatcaagttattatgccacatcctacttggagtatgaaatcgaaaattttggtgctcaacactccacgacccttttcaaaattgacaataatacttttgttcgtctggacaggccccacacgcctcagttccttttccagctgaacgacaccattcaccttcaccaacagttgagtaatacaactgggagactaatttggacactagatgctaatatcaatgctgatattggtgaatgggctttttgggaaaataaaaaaaacctgagcgaacagctgcgtggagaagagctgtctttcgaagctttatcgctcaacgagacagaagacgatgatgcggcatcgtcgagaattacaaagggaagaatctccgaccgggccaccaggaagtattcggacctggttccaaagaattcccctgggatggttccattgcacataccagaaggggaaacaacattgccgtctcagaattcgacagaaggtcgaagagtaggtgtgaacactcaggagaccatcacagagacagctgcaacaattataggcactaacggcaaccatatgcagatctccaccatcgggataagaccgagctccagccaaatcccgagttcctcaccgaccacggcaccaagccctgaggctcagacccccacaacccacacatcaggtccatcagtgatggccaccgaggaaccaacaacaccaccgggaagctcccccggcccaacaacagaagcacccactctcaccaccccagaaaatataacaacagcggttaaaactgtcctgccacaggagtccacaagcaacggtctaataacttcaacagtaacagggattcttgggagtcttgggcttcgaaaacgcagcagaagacaaactaacaccaaagccacgggtaagtgcaatcccaacttacactactggactgcacaagaacaacataatgctgctgggattgcctggatcccgtactttggaccgggtgcggaaggcatatacactgaaggcctgatgcataaccaaaatgccttagtctgtggacttaggcaacttgcaaatgaaacaactcaagctctgcagcttttcttaagagccacaacggagctgcggacatataccatactcaacaggaaggccatagatttccttctgcgacgatggggcgggacatgcaggatcctgggaccagattgttgcattgagccacatgattggacaaaaaacatcactgataaaatcaaccaaatcatccatgatttcatcgacaaccccttacctaatcaggataatgatgataattggtggacaggctggagacagtggatccctgcaggaataggcattactggaattattattgcaattattgctcttctttgcgttggtggtggcggttctggtggtggcggtagtggcggcggaggaagcggtggtggcggttccggatctatgcgtaaaggcgaagagctgttcactggtgtcgtccctattctggtggaactggatggtgatgtcaacggtcataagttttccgtgcgtggcgagggtgaaggtgacgcaactaatggtaaactgacgctgaagttcatctgtactactggtaaactgccggtaccttggccgactctggtaacgacgctgacttatggtgttcagtgctttgctcgttatccggaccatatgaagcagcatgacttcttcaagtccgccatgccggaaggctatgtgcaggaacgcacgatttcctttaaggatgacggcacgtacaaaacgcgtgcggaagtgaaatttgaaggcgataccctggtaaaccgcattgagctgaaaggcattgactttaaagaagacggcaatatcctgggccataagctggaatacaattttaacagccacaatgtttacatcaccgccgataaacaaaaaaatggcattaaagcgaattttaaaattcgccacaacgtggaggatggcagcgtgcagctggctgatcactaccagcaaaacactccaatcggtgatggtcctgttctgctgccagacaatcactatctgagcacgcaaagcgttctgtctaaagatccgaacgagaaacgcgatcatatggttctgctggagttcgtaaccgcagcgggcatcacgcatggtatggatgaactgtacaaatgataa

SEQ ID NO: 849 - protein, 660 aa, synthetic construct
MALPVTALLLPLALLLHAARPMPLGVVTNSTLEVTEIDQLVCKDHLASTDQLKSVGLNLEGSGVSTDIPSATKRWGFRSGVPPKVVSYEAGEWAENCYNLEIKKPDGSECLPPPPDGVRGFPRCRYVHKAQGTGPCPGDYAFHKDGAFFLYDRLASTVIYRGVNFAEGVIAFLILAKPKETFLQSPPIREAVNYTENTSSYYATSYLEYEIENFGAQHSTTLFKIDNNTFVRLDRPHTPQFLFQLNDTIHLHQQLSNTTGRLIWTLDANINADIGEWAFWENKKNLSEQLRGEELSFEALSLNETEDDDAASSRITKGRISDRATRKYSDLVPKNSPGMVPLHIPEGETTLPSQNSTEGRRVGVNTQETITETAATIIGTNGNHMQISTIGIRPSSSQIPSSSPTTAPSPEAQTPTTHTSGPSVMATEEPTTPPGSSPGPTTEAPTLTTPENITTAVKTVLPQESTSNGLITSTVTGILGSLGLRKRSRRQTNTKATGKCNPNLHYWTAQEQHNAAGIAWIPYFGPGAEGIYTEGLMHNQNALVCGLRQLANETTQALQLFLRATTELRTYTILNRKAIDFLLRRWGGTCRILGPDCCIEPHDWTKNITDKINQIIHDFIDNPLPNQDNDDNWWTGWRQWIPAGIGITGIIIAIIALLCV

SEQ ID NO: 850 - DNA, 1980 bp, synthetic construct
  source 1..1980: mol_type = other DNA
atggcactccccgtaactgctctgctgctgccgttggcattgctcctgcacgccgcacgcccgatgcctttgggtgttgtgactaacagcactttagaagtaacagagattgaccagctagtctgcaaggatcatcttgcatctactgaccagctgaaatcagttggtctcaacctcgaggggagcggagtatctactgatatcccatctgcaacaaagcgttggggcttcagatctggtgttcctcccaaggtggtcagctatgaagcgggagaatgggctgaaaattgctacaatcttgaaataaagaagccggacgggagcgaatgcttacccccaccgccagatggtgtcagaggctttccaaggtgccgctatgtgcacaaagcccaaggaaccgggccctgcccaggtgactacgcctttcacaaggatggagctttctttctctatgacaggctggcttcaactgtaatttacagaggagtcaattttgctgagggggtgattgcattcttgatattggctaaaccaaaagaaacgttccttcagtcaccccccattcgagaggcagtaaactacactgaaaatacatcaagttattatgccacatcctacttggagtatgaaatcgaaaattttggtgctcaacactccacgacccttttcaaaattgacaataatacttttgttcgtctggacaggccccacacgcctcagttccttttccagctgaacgacaccattcaccttcaccaacagttgagtaatacaactgggagactaatttggacactagatgctaatatcaatgctgatattggtgaatgggctttttgggaaaataaaaaaaacctgagcgaacagctgcgtggagaagagctgtctttcgaagctttatcgctcaacgagacagaagacgatgatgcggcatcgtcgagaattacaaagggaagaatctccgaccgggccaccaggaagtattcggacctggttccaaagaattcccctgggatggttccattgcacataccagaaggggaaacaacattgccgtctcagaattcgacagaaggtcgaagagtaggtgtgaacactcaggagaccatcacagagacagctgcaacaattataggcactaacggcaaccatatgcagatctccaccatcgggataagaccgagctccagccaaatcccgagttcctcaccgaccacggcaccaagccctgaggctcagacccccacaacccacacatcaggtccatcagtgatggccaccgaggaaccaacaacaccaccgggaagctcccccggcccaacaacagaagcacccactctcaccaccccagaaaatataacaacagcggttaaaactgtcctgccacaggagtccacaagcaacggtctaataacttcaacagtaacagggattcttgggagtcttgggcttcgaaaacgcagcagaagacaaactaacaccaaagccacgggtaagtgcaatcccaacttacactactggactgcacaagaacaacataatgctgctgggattgcctggatcccgtactttggaccgggtgcggaaggcatatacactgaaggcctgatgcataaccaaaatgccttagtctgtggacttaggcaacttgcaaatgaaacaactcaagctctgcagcttttcttaagagccacaacggagctgcggacatataccatactcaacaggaaggccatagatttccttctgcgacgatggggcgggacatgcaggatcctgggaccagattgttgcattgagccacatgattggacaaaaaacatcactgataaaatcaaccaaatcatccatgatttcatcgacaaccccttacctaatcaggataatgatgataattggtggacaggctggagacagtggatccctgcaggaataggcattactggaattattattgcaattattgctcttctttgcgtt

SEQ ID NO: 851 - protein, 451 aa, synthetic construct
MALPVTALLLPLALLLHAARPQTNTKATGKCNPNLHYWTAQEQHNAAGIAWIPYFGPGAEGIYTEGLMHNQNALVCGLRQLANETTQALQLFLRATTELRTYTILNRKAIDFLLRRWGGTCRILGPDCCIEPHDWTKNITDKINQIIHDFIDNPLPNQDNDDNWWTGWRQWIPAGIGITGIIIAIIALLCVGGGGSGGGGSGGGGSGGGGSGSMRKGEELFTGVVPILVELDGDVNGHKFSVRGEGEGDATNGKLTLKFICTTGKLPVPWPTLVTTLTYGVQCFARYPDHMKQHDFFKSAMPEGYVQERTISFKDDGTYKTRAEVKFEGDTLVNRIELKGIDFKEDGNILGHKLEYNFNSHNVYITADKQKNGIKANFKIRHNVEDGSVQLADHYQQNTPIGDGPVLLPDNHYLSTQSVLSKDPNEKRDHMVLLEFVTAAGITHGMDELYK

SEQ ID NO: 852 - DNA, 1359 bp, synthetic construct
  source 1..1359: mol_type = other DNA
atggcactccccgtaactgctctgctgctgccgttggcattgctcctgcacgccgcacgcccgcaaactaacaccaaagccacgggtaagtgcaatcccaacttacactactggactgcacaagaacaacataatgctgctgggattgcctggatcccgtactttggaccgggtgcggaaggcatatacactgaaggcctgatgcataaccaaaatgccttagtctgtggacttaggcaacttgcaaatgaaacaactcaagctctgcagcttttcttaagagccacaacggagctgcggacatataccatactcaacaggaaggccatagatttccttctgcgacgatggggcgggacatgcaggatcctgggaccagattgttgcattgagccacatgattggacaaaaaacatcactgataaaatcaaccaaatcatccatgatttcatcgacaaccccttacctaatcaggataatgatgataattggtggacaggctggagacagtggatccctgcaggaataggcattactggaattattattgcaattattgctcttctttgcgttggtggtggcggttctggtggtggcggtagtggcggcggaggaagcggtggtggcggttccggatctatgcgtaaaggcgaagagctgttcactggtgtcgtccctattctggtggaactggatggtgatgtcaacggtcataagttttccgtgcgtggcgagggtgaaggtgacgcaactaatggtaaactgacgctgaagttcatctgtactactggtaaactgccggtaccttggccgactctggtaacgacgctgacttatggtgttcagtgctttgctcgttatccggaccatatgaagcagcatgacttcttcaagtccgccatgccggaaggctatgtgcaggaacgcacgatttcctttaaggatgacggcacgtacaaaacgcgtgcggaagtgaaatttgaaggcgataccctggtaaaccgcattgagctgaaaggcattgactttaaagaagacggcaatatcctgggccataagctggaatacaattttaacagccacaatgtttacatcaccgccgataaacaaaaaaatggcattaaagcgaattttaaaattcgccacaacgtggaggatggcagcgtgcagctggctgatcactaccagcaaaacactccaatcggtgatggtcctgttctgctgccagacaatcactatctgagcacgcaaagcgttctgtctaaagatccgaacgagaaacgcgatcatatggttctgctggagttcgtaaccgcagcgggcatcacgcatggtatggatgaactgtacaaatgataa

SEQ ID NO: 853 - protein, 191 aa, synthetic construct
MALPVTALLLPLALLLHAARPQTNTKATGKCNPNLHYWTAQEQHNAAGIAWIPYFGPGAEGIYTEGLMHNQNALVCGLRQLANETTQALQLFLRATTELRTYTILNRKAIDFLLRRWGGTCRILGPDCCIEPHDWTKNITDKINQIIHDFIDNPLPNQDNDDNWWTGWRQWIPAGIGITGIIIAIIALLCV

SEQ ID NO: 854 - DNA, 573 bp, synthetic construct
  source 1..573: mol_type = other DNA
atggcactccccgtaactgctctgctgctgccgttggcattgctcctgcacgccgcacgcccgcaaactaacaccaaagccacgggtaagtgcaatcccaacttacactactggactgcacaagaacaacataatgctgctgggattgcctggatcccgtactttggaccgggtgcggaaggcatatacactgaaggcctgatgcataaccaaaatgccttagtctgtggacttaggcaacttgcaaatgaaacaactcaagctctgcagcttttcttaagagccacaacggagctgcggacatataccatactcaacaggaaggccatagatttccttctgcgacgatggggcgggacatgcaggatcctgggaccagattgttgcattgagccacatgattggacaaaaaacatcactgataaaatcaaccaaatcatccatgatttcatcgacaaccccttacctaatcaggataatgatgataattggtggacaggctggagacagtggatccctgcaggaataggcattactggaattattattgcaattattgctcttctttgcgtt

SEQ ID NO: 855 - protein, 830 aa, synthetic construct
MALPVTALLLPLALLLHAARPSTSQKSIVAYTMSLGADSSIAYSNNTIAIPTNFSISITTEVMPVSMAKTSVDCNMYICGDSTECANLLLQYGSFCTQLNRALSGIAAEQDRNTREVFAQVKQMYKTPTLKYFGGFNFSQILPDPLKPTKRSFIEDLLFNKVTLADAGFMKQYGECLGDINARDLICAQKFNGLTVLPPLLTDDMIAAYTAALVSGTATAGWTFGAGAALQIPFAMQMAYRFNGIGVTQNVLYENQKQIANQFNKAISQIQESLTTTSTALGKLQDVVNQNAQALNTLVKQLSSNFGAISSVLNDILSRLDKVEAEVQIDRLITGRLQSLQTYVTQQLIRAAEIRASANLAATKMSECVLGQSKRVDFCGKGYHLMSFPQAAPHGVVFLHVTYVPSQERNFTTAPAICHEGKAYFPREGVFVFNGTSWFITQRNFFSPQIITTDNTFVSGNCDVVIGIINNTVYDPLQPELDSFKEELDKYFKNHTSPDVDLGDISGINASVVNIQKEIDRLNEVAKNLNESLIDLQELGKYEQYIKWPWYVWLGFIAGLIAIVMVTILLGGGGSGGGGSGGGGSGGGGSGSMRKGEELFTGVVPILVELDGDVNGHKFSVRGEGEGDATNGKLTLKFICTTGKLPVPWPTLVTTLTYGVQCFARYPDHMKQHDFFKSAMPEGYVQERTISFKDDGTYKTRAEVKFEGDTLVNRIELKGIDFKEDGNILGHKLEYNFNSHNVYITADKQKNGIKANFKIRHNVEDGSVQLADHYQQNTPIGDGPVLLPDNHYLSTQSVLSKDPNEKRDHMVLLEFVTAAGITHGMDELYK

SEQ ID NO: 856 - DNA, 2496 bp, synthetic construct
  source 1..2496: mol_type = other DNA
atggcactccccgtaactgctctgctgctgccgttggcattgctcctgcacgccgcacgcccgagtactagccaaaaatctattgtggcttatactatgtctttaggtgctgatagttcaattgcttactctaataacaccattgctatacctactaacttttcaattagcattactacagaagtaatgcctgtttctatggctaaaacctccgtagattgtaatatgtacatctgcggagattctactgaatgtgctaatttgcttctccaatatggtagcttttgcacacaactaaatcgtgcactctcaggtattgctgctgaacaggatcgcaacacacgtgaagtgttcgctcaagtcaaacaaatgtacaaaaccccaactttgaaatattttggtggttttaatttttcacaaatattacctgaccctctaaagccaactaagaggtcttttattgaggacttgctctttaataaggtgacactcgctgatgctggcttcatgaagcaatatggcgaatgcctaggtgatattaatgctagagatctcatttgtgcgcagaagttcaatggacttacagtgttgccacctctgctcactgatgatatgattgctgcctacactgctgctctagttagtggtactgccactgctggatggacatttggtgctggcgctgctcttcaaataccttttgctatgcaaatggcatataggttcaatggcattggagttacccaaaatgttctctatgagaaccaaaaacaaatcgccaaccaatttaacaaggcgattagtcaaattcaagaatcacttacaacaacatcaactgcattgggcaagctgcaagacgttgttaaccagaatgctcaagcattaaacacacttgttaaacaacttagctctaattttggtgcaatttcaagtgtgctaaatgatatcctttcgcgacttgataaagtcgaggcggaggtacaaattgacaggttaattacaggcagacttcaaagccttcaaacctatgtaacacaacaactaatcagggctgctgaaatcagggcttctgctaatcttgctgctactaaaatgtctgagtgtgttcttggacaatcaaaaagagttgacttttgtggaaagggctaccaccttatgtccttcccacaagcagccccgcatggtgttgtcttcctacatgtcacgtatgtgccatcccaggagaggaacttcaccacagcgccagcaatttgtcatgaaggcaaagcatacttccctcgtgaaggtgtttttgtgtttaatggcacttcttggtttattacacagaggaacttcttttctccacaaataattactacagacaatacatttgtctcaggaaattgtgatgtcgttattggcatcattaacaacacagtttatgatcctctgcaacctgagcttgactcattcaaagaagagctggacaagtacttcaaaaatcatacatcaccagatgttgatcttggcgacatttcaggcattaacgcttctgtcgtcaacattcaaaaagaaattgaccgcctcaatgaggtcgctaaaaatttaaatgaatcactcattgaccttcaagaattgggaaaatatgagcaatatattaaatggccttggtatgtttggctcggcttcattgctggactaattgccatcgtcatggttacaatcttgcttggtggtggcggttctggtggtggcggtagtggcggcggaggaagcggtggtggcggttccggatctatgcgtaaaggcgaagagctgttcactggtgtcgtccctattctggtggaactggatggtgatgtcaacggtcataagttttccgtgcgtggcgagggtgaaggtgacgcaactaatggtaaactgacgctgaagttcatctgtactactggtaaactgccggtaccttggccgactctggtaacgacgctgacttatggtgttcagtgctttgctcgttatccggaccatatgaagcagcatgacttcttcaagtccgccatgccggaaggctatgtgcaggaacgcacgatttcctttaaggatgacggcacgtacaaaacgcgtgcggaagtgaaatttgaaggcgataccctggtaaaccgcattgagctgaaaggcattgactttaaagaagacggcaatatcctgggccataagctggaatacaattttaacagccacaatgtttacatcaccgccgataaacaaaaaaatggcattaaagcgaattttaaaattcgccacaacgtggaggatggcagcgtgcagctggctgatcactaccagcaaaacactccaatcggtgatggtcctgttctgctgccagacaatcactatctgagcacgcaaagcgttctgtctaaagatccgaacgagaaacgcgatcatatggttctgctggagttcgtaaccgcagcgggcatcacgcatggtatggatgaactgtacaaatgataa

SEQ ID NO: 857 - protein, 570 aa, synthetic construct
MALPVTALLLPLALLLHAARPSTSQKSIVAYTMSLGADSSIAYSNNTIAIPTNFSISITTEVMPVSMAKTSVDCNMYICGDSTECANLLLQYGSFCTQLNRALSGIAAEQDRNTREVFAQVKQMYKTPTLKYFGGFNFSQILPDPLKPTKRSFIEDLLFNKVTLADAGFMKQYGECLGDINARDLICAQKFNGLTVLPPLLTDDMIAAYTAALVSGTATAGWTFGAGAALQIPFAMQMAYRFNGIGVTQNVLYENQKQIANQFNKAISQIQESLTTTSTALGKLQDVVNQNAQALNTLVKQLSSNFGAISSVLNDILSRLDKVEAEVQIDRLITGRLQSLQTYVTQQLIRAAEIRASANLAATKMSECVLGQSKRVDFCGKGYHLMSFPQAAPHGVVFLHVTYVPSQERNFTTAPAICHEGKAYFPREGVFVFNGTSWFITQRNFFSPQIITTDNTFVSGNCDVVIGIINNTVYDPLQPELDSFKEELDKYFKNHTSPDVDLGDISGINASVVNIQKEIDRLNEVAKNLNESLIDLQELGKYEQYIKWPWYVWLGFIAGLIAIVMVTILL

SEQ ID NO: 858 - DNA, 1710 bp, synthetic construct
  source 1..1710: mol_type = other DNA
atggcactccccgtaactgctctgctgctgccgttggcattgctcctgcacgccgcacgcccgagtactagccaaaaatctattgtggcttatactatgtctttaggtgctgatagttcaattgcttactctaataacaccattgctatacctactaacttttcaattagcattactacagaagtaatgcctgtttctatggctaaaacctccgtagattgtaatatgtacatctgcggagattctactgaatgtgctaatttgcttctccaatatggtagcttttgcacacaactaaatcgtgcactctcaggtattgctgctgaacaggatcgcaacacacgtgaagtgttcgctcaagtcaaacaaatgtacaaaaccccaactttgaaatattttggtggttttaatttttcacaaatattacctgaccctctaaagccaactaagaggtcttttattgaggacttgctctttaataaggtgacactcgctgatgctggcttcatgaagcaatatggcgaatgcctaggtgatattaatgctagagatctcatttgtgcgcagaagttcaatggacttacagtgttgccacctctgctcactgatgatatgattgctgcctacactgctgctctagttagtggtactgccactgctggatggacatttggtgctggcgctgctcttcaaataccttttgctatgcaaatggcatataggttcaatggcattggagttacccaaaatgttctctatgagaaccaaaaacaaatcgccaaccaatttaacaaggcgattagtcaaattcaagaatcacttacaacaacatcaactgcattgggcaagctgcaagacgttgttaaccagaatgctcaagcattaaacacacttgttaaacaacttagctctaattttggtgcaatttcaagtgtgctaaatgatatcctttcgcgacttgataaagtcgaggcggaggtacaaattgacaggttaattacaggcagacttcaaagccttcaaacctatgtaacacaacaactaatcagggctgctgaaatcagggcttctgctaatcttgctgctactaaaatgtctgagtgtgttcttggacaatcaaaaagagttgacttttgtggaaagggctaccaccttatgtccttcccacaagcagccccgcatggtgttgtcttcctacatgtcacgtatgtgccatcccaggagaggaacttcaccacagcgccagcaatttgtcatgaaggcaaagcatacttccctcgtgaaggtgtttttgtgtttaatggcacttcttggtttattacacagaggaacttcttttctccacaaataattactacagacaatacatttgtctcaggaaattgtgatgtcgttattggcatcattaacaacacagtttatgatcctctgcaacctgagcttgactcattcaaagaagagctggacaagtacttcaaaaatcatacatcaccagatgttgatcttggcgacatttcaggcattaacgcttctgtcgtcaacattcaaaaagaaattgaccgcctcaatgaggtcgctaaaaatttaaatgaatcactcattgaccttcaagaattgggaaaatatgagcaatatattaaatggccttggtatgtttggctcggcttcattgctggactaattgccatcgtcatggttacaatcttgctt

SEQ ID NO: 859 - protein, 872 aa, synthetic construct
MALPVTALLLPLALLLHAARPVNDGDMRLADGGATNQGRVEIFYRGQWGTVCDNLWDLTDASVVCRALGFENATQALGRAAFGQGSGPIMLDEVQCTGTEASLADCKSLGWLKSNCRHERDAGVVCTNETRSTHTLDLSRELSEALGQIFDSQRGCDLSISVNVQGEDALGFCGHTVILTANLEAQALWKEPGSNVTMSVDAECVPMVRDLLRYFYSRRIDITLSSVKCFHKLASAYGARQLQGYCASLFAILLPQDPSFQMPLDLYAYAVATGDALLEKLCLQFLAWNFEALTQAEAWPSVPTDLLQLLLPRSDLAVPSELALLKAVDTWSWGERASHEEVEGLVEKIRFPMMLPEELFELQFNLSLYWSHEALFQKKTLQALEFHTVPFQLLARYKGLNLTEDTYKPRIYTSPTWSAFVTDSSWSARKSQLVYQSRRGPLVKYSSDYFQAPSDYRYYPYQSFQTPQHPSFLFQDKRVSWSLVYLPTIQSCWNYGFSCSSDELPVLGLTKSGGSDRTIAYENKALMLCEGLFVADVTDFEGWKAAIPSALDTNSSKSTSSFPCPAGHFNGFRTVIRPFYLTNSSGVDIYIWAPLAGTCGVLLLSLVITLYCGGGGSGGGGSGGGGSGGGGSGSMRKGEELFTGVVPILVELDGDVNGHKFSVRGEGEGDATNGKLTLKFICTTGKLPVPWPTLVTTLTYGVQCFARYPDHMKQHDFFKSAMPEGYVQERTISFKDDGTYKTRAEVKFEGDTLVNRIELKGIDFKEDGNILGHKLEYNFNSHNVYITADKQKNGIKANFKIRHNVEDGSVQLADHYQQNTPIGDGPVLLPDNHYLSTQSVLSKDPNEKRDHMVLLEFVTAAGITHGMDELYK

SEQ ID NO: 860 - DNA, 2622 bp, synthetic construct
  source 1..2622: mol_type = other DNA
atggcactccccgtaactgctctgctgctgccgttggcattgctcctgcacgccgcacgcccggtgaacgatggtgacatgcggctggccgatgggggcgccaccaaccagggccgcgtggagatcttctacagaggccagtggggcactgtgtgtgacaacctgtgggacctgactgatgccagcgtcgtctgccgggccctgggcttcgagaacgccacccaggctctgggcagagctgccttcgggcaaggatcaggccccatcatgctggatgaggtccagtgcacgggaaccgaggcctcactggccgactgcaagtccctgggctggctgaagagcaactgcaggcacgagagagacgctggtgtggtctgcaccaatgaaaccaggagcacccacaccctggacctctccagggagctctcggaggcccttggccagatctttgacagccagcggggctgcgacctgtccatcagcgtgaatgtgcagggcgaggacgccctgggcttctgtggccacacggtcatcctgactgccaacctggaggcccaggccctgtggaaggagccgggcagcaatgtcaccatgagtgtggatgctgagtgtgtgcccatggtcagggaccttctcaggtacttctactcccgaaggattgacatcaccctgtcgtcagtcaagtgcttccacaagctggcctctgcctatggggccaggcagctgcagggctactgcgcaagcctctttgccatcctcctcccccaggacccctcgttccagatgcccctggacctgtatgcctatgcagtggccacaggggacgccctgctggagaagctctgcctacagttcctggcctggaacttcgaggccttgacgcaggccgaggcctggcccagtgtccccacagacctgctccaactgctgctgcccaggagcgacctggcggtgcccagcgagctggccctactgaaggccgtggacacctggagctggggggagcgtgcctcccatgaggaggtggagggcttggtggagaagatccgcttccccatgatgctccctgaggagctctttgagctgcagttcaacctgtccctgtactggagccacgaggccctgttccagaagaagactctgcaggccctggaattccacactgtgcccttccagttgctggcccggtacaaaggcctgaacctcaccgaggatacctacaagccccggatttacacctcgcccacctggagtgcctttgtgacagacagttcctggagtgcacggaagtcacaactggtctatcagtccagacgggggcctttggtcaaatattcttctgattacttccaagccccctctgactacagatactacccctaccagtccttccagactccacaacaccccagcttcctcttccaggacaagagggtgtcctggtccctggtctacctccccaccatccagagctgctggaactacggcttctcctgctcctcggacgagctccctgtcctgggcctcaccaagtctggcggctcagatcgcaccattgcctacgaaaacaaagccctgatgctctgcgaagggctcttcgtggcagacgtcaccgatttcgagggctggaaggctgcgattcccagtgccctggacaccaacagctcgaagagcacctcctccttcccctgcccggcagggcacttcaacggcttccgcacggtcatccgccccttctacctgaccaactcctcaggtgtggacatctacatctgggcgcccttggccgggacttgtggggtccttctcctgtcactggttatcaccctttactgcggtggtggcggttctggtggtggcggtagtggcggcggaggaagcggtggtggcggttccggatctatgcgtaaaggcgaagagctgttcactggtgtcgtccctattctggtggaactggatggtgatgtcaacggtcataagttttccgtgcgtggcgagggtgaaggtgacgcaactaatggtaaactgacgctgaagttcatctgtactactggtaaactgccggtaccttggccgactctggtaacgacgctgacttatggtgttcagtgctttgctcgttatccggaccatatgaagcagcatgacttcttcaagtccgccatgccggaaggctatgtgcaggaacgcacgatttcctttaaggatgacggcacgtacaaaacgcgtgcggaagtgaaatttgaaggcgataccctggtaaaccgcattgagctgaaaggcattgactttaaagaagacggcaatatcctgggccataagctggaatacaattttaacagccacaatgtttacatcaccgccgataaacaaaaaaatggcattaaagcgaattttaaaattcgccacaacgtggaggatggcagcgtgcagctggctgatcactaccagcaaaacactccaatcggtgatggtcctgttctgctgccagacaatcactatctgagcacgcaaagcgttctgtctaaagatccgaacgagaaacgcgatcatatggttctgctggagttcgtaaccgcagcgggcatcacgcatggtatggatgaactgtacaaatgataa

SEQ ID NO: 861 - protein, 612 aa, synthetic construct
MALPVTALLLPLALLLHAARPVNDGDMRLADGGATNQGRVEIFYRGQWGTVCDNLWDLTDASVVCRALGFENATQALGRAAFGQGSGPIMLDEVQCTGTEASLADCKSLGWLKSNCRHERDAGVVCTNETRSTHTLDLSRELSEALGQIFDSQRGCDLSISVNVQGEDALGFCGHTVILTANLEAQALWKEPGSNVTMSVDAECVPMVRDLLRYFYSRRIDITLSSVKCFHKLASAYGARQLQGYCASLFAILLPQDPSFQMPLDLYAYAVATGDALLEKLCLQFLAWNFEALTQAEAWPSVPTDLLQLLLPRSDLAVPSELALLKAVDTWSWGERASHEEVEGLVEKIRFPMMLPEELFELQFNLSLYWSHEALFQKKTLQALEFHTVPFQLLARYKGLNLTEDTYKPRIYTSPTWSAFVTDSSWSARKSQLVYQSRRGPLVKYSSDYFQAPSDYRYYPYQSFQTPQHPSFLFQDKRVSWSLVYLPTIQSCWNYGFSCSSDELPVLGLTKSGGSDRTIAYENKALMLCEGLFVADVTDFEGWKAAIPSALDTNSSKSTSSFPCPAGHFNGFRTVIRPFYLTNSSGVDIYIWAPLAGTCGVLLLSLVITLYC

SEQ ID NO: 862 - DNA, 1836 bp, synthetic construct
  source 1..1836: mol_type = other DNA
atggcactccccgtaactgctctgctgctgccgttggcattgctcctgcacgccgcacgcccggtgaacgatggtgacatgcggctggccgatgggggcgccaccaaccagggccgcgtggagatcttctacagaggccagtggggcactgtgtgtgacaacctgtgggacctgactgatgccagcgtcgtctgccgggccctgggcttcgagaacgccacccaggctctgggcagagctgccttcgggcaaggatcaggccccatcatgctggatgaggtccagtgcacgggaaccgaggcctcactggccgactgcaagtccctgggctggctgaagagcaactgcaggcacgagagagacgctggtgtggtctgcaccaatgaaaccaggagcacccacaccctggacctctccagggagctctcggaggcccttggccagatctttgacagccagcggggctgcgacctgtccatcagcgtgaatgtgcagggcgaggacgccctgggcttctgtggccacacggtcatcctgactgccaacctggaggcccaggccctgtggaaggagccgggcagcaatgtcaccatgagtgtggatgctgagtgtgtgcccatggtcagggaccttctcaggtacttctactcccgaaggattgacatcaccctgtcgtcagtcaagtgcttccacaagctggcctctgcctatggggccaggcagctgcagggctactgcgcaagcctctttgccatcctcctcccccaggacccctcgttccagatgcccctggacctgtatgcctatgcagtggccacaggggacgccctgctggagaagctctgcctacagttcctggcctggaacttcgaggccttgacgcaggccgaggcctggcccagtgtccccacagacctgctccaactgctgctgcccaggagcgacctggcggtgcccagcgagctggccctactgaaggccgtggacacctggagctggggggagcgtgcctcccatgaggaggtggagggcttggtggagaagatccgcttccccatgatgctccctgaggagctctttgagctgcagttcaacctgtccctgtactggagccacgaggccctgttccagaagaagactctgcaggccctggaattccacactgtgcccttccagttgctggcccggtacaaaggcctgaacctcaccgaggatacctacaagccccggatttacacctcgcccacctggagtgcctttgtgacagacagttcctggagtgcacggaagtcacaactggtctatcagtccagacgggggcctttggtcaaatattcttctgattacttccaagccccctctgactacagatactacccctaccagtccttccagactccacaacaccccagcttcctcttccaggacaagagggtgtcctggtccctggtctacctccccaccatccagagctgctggaactacggcttctcctgctcctcggacgagctccctgtcctgggcctcaccaagtctggcggctcagatcgcaccattgcctacgaaaacaaagccctgatgctctgcgaagggctcttcgtggcagacgtcaccgatttcgagggctggaaggctgcgattcccagtgccctggacaccaacagctcgaagagcacctcctccttcccctgcccggcagggcacttcaacggcttccgcacggtcatccgccccttctacctgaccaactcctcaggtgtggacatctacatctgggcgcccttggccgggacttgtggggtccttctcctgtcactggttatcaccctttactgc

SEQ ID NO: 863 - protein, 336 aa, synthetic construct
MGRAMVARLGLGLLLLALLLPTQIYSSETTTGTSSNSSQSTSNSGLAPNPTNATTKAAGGALQSTASLFVVSLSLLHLYSEGRGSLLTCGDVEENPGPMRKGEELFTGVVPILVELDGDVNGHKFSVRGEGEGDATNGKLTLKFICTTGKLPVPWPTLVTTLTYGVQCFARYPDHMKQHDFFKSAMPEGYVQERTISFKDDGTYKTRAEVKFEGDTLVNRIELKGIDFKEDGNILGHKLEYNFNSHNVYITADKQKNGIKANFKIRHNVEDGSVQLADHYQQNTPIGDGPVLLPDNHYLSTQSVLSKDPNEKRDHMVLLEFVTAAGITHGMDELYK

SEQ ID NO: 864 - DNA, 1014 bp, synthetic construct
  source 1..1014: mol_type = other DNA
atgggcagagcaatggtggccaggctcgggctggggctgctgctgctggcactgctcctacccacgcagatttattccagtgaaacaacaactggaacttcaagtaactcctcccagagtacttccaactctgggttggccccaaatccaactaatgccaccaccaaggcggctggtggtgccctgcagtcaacagccagtctcttcgtggtctcactctctcttctgcatctctactctgagggcaggggatctctccttacttgtggcgacgtggaggagaaccccggccccatgcgtaaaggcgaagagctgttcactggtgtcgtccctattctggtggaactggatggtgatgtcaacggtcataagttttccgtgcgtggcgagggtgaaggtgacgcaactaatggtaaactgacgctgaagttcatctgtactactggtaaactgccggtaccttggccgactctggtaacgacgctgacttatggtgttcagtgctttgctcgttatccggaccatatgaagcagcatgacttcttcaagtccgccatgccggaaggctatgtgcaggaacgcacgatttcctttaaggatgacggcacgtacaaaacgcgtgcggaagtgaaatttgaaggcgataccctggtaaaccgcattgagctgaaaggcattgactttaaagaagacggcaatatcctgggccataagctggaatacaattttaacagccacaatgtttacatcaccgccgataaacaaaaaaatggcattaaagcgaattttaaaattcgccacaacgtggaggatggcagcgtgcagctggctgatcactaccagcaaaacactccaatcggtgatggtcctgttctgctgccagacaatcactatctgagcacgcaaagcgttctgtctaaagatccgaacgagaaacgcgatcatatggttctgctggagttcgtaaccgcagcgggcatcacgcatggtatggatgaactgtacaaatgataa

SEQ ID NO: 865 - protein, 80 aa, synthetic construct
MGRAMVARLGLGLLLLALLLPTQIYSSETTTGTSSNSSQSTSNSGLAPNPTNATTKAAGGALQSTASLFVVSLSLLHLYS

SEQ ID NO: 866 - DNA, 240 bp, synthetic construct
  source 1..240: mol_type = other DNA
atgggcagagcaatggtggccaggctcgggctggggctgctgctgctggcactgctcctacccacgcagatttattccagtgaaacaacaactggaacttcaagtaactcctcccagagtacttccaactctgggttggccccaaatccaactaatgccaccaccaaggcggctggtggtgccctgcagtcaacagccagtctcttcgtggtctcactctctcttctgcatctctactct

SEQ ID NO: 867 - protein, 648 aa, synthetic construct
MALPVTALLLPLALLLHAARPQTHTVGGSTAHNARTLTGMFSLGARQKIQLINTNGSWHINRTALNCNDSLHTGFLASLFYTHSFNSSGCPERMSACRSIEAFRVGWGALQYEDNVTNPEDMRPYCWHYPPRQCGVVSASSVCGPVYCFTPSPVVVGTTDRLGAPTYTWGENETDVFLLNSTRPPQGSWFGCTWMNSTGYTKTCGAPPCRIRADFNASMDLLCPTDCFRKHPDTTYIKCGSGPWLTPRCLIDYPYRLWHYPCTVNYTIFKIRMYVGGVEHRLTAACNFTRGDRCNLEDRDRSQLSPLLHSTTEWAILPCTYSDLPALSTGLLHLHQNIVDVQFMYGLSPALTKYIVRWEWVVLLFLLLADARVCACLWMLILLGQAEAGGGGSGGGGSGGGGSGGGGSGSMRKGEELFTGVVPILVELDGDVNGHKFSVRGEGEGDATNGKLTLKFICTTGKLPVPWPTLVTTLTYGVQCFARYPDHMKQHDFFKSAMPEGYVQERTISFKDDGTYKTRAEVKFEGDTLVNRIELKGIDFKEDGNILGHKLEYNFNSHNVYITADKQKNGIKANFKIRHNVEDGSVQLADHYQQNTPIGDGPVLLPDNHYLSTQSVLSKDPNEKRDHMVLLEFVTAAGITHGMDELYK

SEQ ID NO: 868 - DNA, 1950 bp, synthetic construct
  source 1..1950: mol_type = other DNA
atggcactccccgtaactgctctgctgctgccgttggcattgctcctgcacgccgcacgcccgcaaacccataccgttgggggttctaccgcgcataacgccaggaccctcaccggcatgttctcccttggtgccaggcagaaaatccagctcatcaacaccaatggcagttggcacatcaaccgcaccgccctgaactgcaatgactctttgcacaccggcttcctcgcgtcactgttctacacccacagcttcaactcgtcaggatgtcccgaacgcatgtccgcctgccgcagtatcgaggcctttcgggtgggatggggcgccttacaatatgaggacaatgtcaccaatccagaggatatgagaccgtattgctggcactacccaccaagacagtgtggtgtagtctccgcgagctctgtgtgtggcccagtgtactgtttcacccccagcccagtagtagtgggtacgaccgatagacttggagcgcccacttacacgtggggggagaatgagacagatgtcttcctattgaacagcactcgaccaccgcaggggtcatggttcggctgcacgtggatgaactccactggctacaccaagacttgcggcgcaccaccctgccgcattagagctgacttcaatgccagcatggacttgttgtgccccacggactgttttaggaagcatcctgataccacctacatcaaatgtggctctgggccctggctcacgccaaggtgcctgatcgactacccctacaggctctggcattacccctgcacagttaactataccatcttcaaaataaggatgtatgtggggggggtcgagcacaggctcacggctgcgtgcaatttcactcgtggggatcgttgcaacttggaggacagagacagaagtcaactgtctcctttgctgcactccaccacggagtgggccattttaccttgcacttactcggacctgcccgccttgtcgactggtcttctccacctccaccaaaacatcgtggacgtgcaattcatgtatggcctatcacctgctctcacaaaatacatcgtccgatgggagtgggtagtactcttattcctgctcttagcggacgccagggtttgcgcctgcttatggatgctcatcttgttgggccaggccgaagcaggtggtggcggttctggtggtggcggtagtggcggcggaggaagcggtggtggcggttccggatctatgcgtaaaggcgaagagctgttcactggtgtcgtccctattctggtggaactggatggtgatgtcaacggtcataagttttccgtgcgtggcgagggtgaaggtgacgcaactaatggtaaactgacgctgaagttcatctgtactactggtaaactgccggtaccttggccgactctggtaacgacgctgacttatggtgttcagtgctttgctcgttatccggaccatatgaagcagcatgacttcttcaagtccgccatgccggaaggctatgtgcaggaacgcacgatttcctttaaggatgacggcacgtacaaaacgcgtgcggaagtgaaatttgaaggcgataccctggtaaaccgcattgagctgaaaggcattgactttaaagaagacggcaatatcctgggccataagctggaatacaattttaacagccacaatgtttacatcaccgccgataaacaaaaaaatggcattaaagcgaattttaaaattcgccacaacgtggaggatggcagcgtgcagctggctgatcactaccagcaaaacactccaatcggtgatggtcctgttctgctgccagacaatcactatctgagcacgcaaagcgttctgtctaaagatccgaacgagaaacgcgatcatatggttctgctggagttcgtaaccgcagcgggcatcacgcatggtatggatgaactgtacaaatgataa

SEQ ID NO: 869 - protein, 388 aa, synthetic construct
MALPVTALLLPLALLLHAARPQTHTVGGSTAHNARTLTGMFSLGARQKIQLINTNGSWHINRTALNCNDSLHTGFLASLFYTHSFNSSGCPERMSACRSIEAFRVGWGALQYEDNVTNPEDMRPYCWHYPPRQCGVVSASSVCGPVYCFTPSPVVVGTTDRLGAPTYTWGENETDVFLLNSTRPPQGSWFGCTWMNSTGYTKTCGAPPCRIRADFNASMDLLCPTDCFRKHPDTTYIKCGSGPWLTPRCLIDYPYRLWHYPCTVNYTIFKIRMYVGGVEHRLTAACNFTRGDRCNLEDRDRSQLSPLLHSTTEWAILPCTYSDLPALSTGLLHLHQNIVDVQFMYGLSPALTKYIVRWEWVVLLFLLLADARVCACLWMLILLGQAEA

SEQ ID NO: 870 - DNA, 1164 bp, synthetic construct
  source 1..1164: mol_type = other DNA
atggcactccccgtaactgctctgctgctgccgttggcattgctcctgcacgccgcacgcccgcaaacccataccgttgggggttctaccgcgcataacgccaggaccctcaccggcatgttctcccttggtgccaggcagaaaatccagctcatcaacaccaatggcagttggcacatcaaccgcaccgccctgaactgcaatgactctttgcacaccggcttcctcgcgtcactgttctacacccacagcttcaactcgtcaggatgtcccgaacgcatgtccgcctgccgcagtatcgaggcctttcgggtgggatggggcgccttacaatatgaggacaatgtcaccaatccagaggatatgagaccgtattgctggcactacccaccaagacagtgtggtgtagtctccgcgagctctgtgtgtggcccagtgtactgtttcacccccagcccagtagtagtgggtacgaccgatagacttggagcgcccacttacacgtggggggagaatgagacagatgtcttcctattgaacagcactcgaccaccgcaggggtcatggttcggctgcacgtggatgaactccactggctacaccaagacttgcggcgcaccaccctgccgcattagagctgacttcaatgccagcatggacttgttgtgccccacggactgttttaggaagcatcctgataccacctacatcaaatgtggctctgggccctggctcacgccaaggtgcctgatcgactacccctacaggctctggcattacccctgcacagttaactataccatcttcaaaataaggatgtatgtggggggggtcgagcacaggctcacggctgcgtgcaatttcactcgtggggatcgttgcaacttggaggacagagacagaagtcaactgtctcctttgctgcactccaccacggagtgggccattttaccttgcacttactcggacctgcccgccttgtcgactggtcttctccacctccaccaaaacatcgtggacgtgcaattcatgtatggcctatcacctgctctcacaaaatacatcgtccgatgggagtgggtagtactcttattcctgctcttagcggacgccagggtttgcgcctgcttatggatgctcatcttgttgggccaggccgaagca

SEQ ID NO: 871 - protein, 591 aa, synthetic construct
MALPVTALLLPLALLLHAARPQPVLTQSPSVSVSPGQTASITCSGDKLGDTYACWYQQKPGQSPVLVIYQDTKRPSGIPERFSGSNSGNTATLTISGTQAMDEADYYCQAWDSSTVVFGGGTKLTVLGGGGSGGGGSGGGGSQVQLVESEGGLVQPGGSLRLSCAASGFTFSSYEMNWVRQAPGKGLEWVSYISSSGSTIYYADSVKGRFTISRDNAKNSLYLQMNSLRAEDTAVYYCAREAKGYYYGMDVWGQGTTVTVSSTTTPAPRPPTPAPTIASQPLSLRPEACRPAAGGAVHTRGLDFACDIYIWAPLAGTCGVLLLSLVITLYCGGGGSGGGGSGGGGSGGGGSGSMRKGEELFTGVVPILVELDGDVNGHKFSVRGEGEGDATNGKLTLKFICTTGKLPVPWPTLVTTLTYGVQCFARYPDHMKQHDFFKSAMPEGYVQERTISFKDDGTYKTRAEVKFEGDTLVNRIELKGIDFKEDGNILGHKLEYNFNSHNVYITADKQKNGIKANFKIRHNVEDGSVQLADHYQQNTPIGDGPVLLPDNHYLSTQSVLSKDPNEKRDHMVLLEFVTAAGITHGMDELYK

SEQ ID NO: 872 - DNA, 1779 bp, synthetic construct
  source 1..1779: mol_type = other DNA
atggcactccccgtaactgctctgctgctgccgttggcattgctcctgcacgccgcacgcccgcagcctgtgctgactcagtcaccctcagtgtccgtgtccccaggacagacagccagcatcacctgctctggagataaattgggggatacatatgcttgctggtatcagcagaagccaggccagtcccctgtgctggtcatctatcaagataccaagcggccctcagggatccctgagcgattctctggctccaactctgggaacacagccactctgaccatcagcgggacccaggctatggatgaggctgactattactgtcaggcgtgggacagcagcactgtggtattcggcggagggaccaagctgaccgtcctaggtggtggcggatccggtggtggcggttctggtggtggcggctcccaggtgcagctggtggagtctgagggaggcttggtacagcctggagggtccctgagactctcctgtgcagcctctggattcaccttcagtagttatgaaatgaactgggtccgccaggctccagggaaggggctggagtgggtttcatacattagtagtagtggtagtaccatatactacgcagactctgtgaagggccgattcaccatctccagagacaacgccaagaactcactgtatctgcaaatgaacagcctgagagccgaggacacggctgtttattactgtgcgagagaggccaaggggtactactacggtatggacgtctggggccaagggaccacggtcaccgtctcgagtaccacgacgccagcgccgcgaccaccaacaccggcgcccaccatcgcgtcgcagcccctgtccctgcgcccagaggcgtgccggccagcggcggggggcgcagtgcacacgagggggctggacttcgcctgtgatatctacatctgggcgcccttggccgggacttgtggggtccttctcctgtcactggttatcaccctttactgcggtggtggcggttctggtggtggcggtagtggcggcggaggaagcggtggtggcggttccggatctatgcgtaaaggcgaagagctgttcactggtgtcgtccctattctggtggaactggatggtgatgtcaacggtcataagttttccgtgcgtggcgagggtgaaggtgacgcaactaatggtaaactgacgctgaagttcatctgtactactggtaaactgccggtaccttggccgactctggtaacgacgctgacttatggtgttcagtgctttgctcgttatccggaccatatgaagcagcatgacttcttcaagtccgccatgccggaaggctatgtgcaggaacgcacgatttcctttaaggatgacggcacgtacaaaacgcgtgcggaagtgaaatttgaaggcgataccctggtaaaccgcattgagctgaaaggcattgactttaaagaagacggcaatatcctgggccataagctggaatacaattttaacagccacaatgtttacatcaccgccgataaacaaaaaaatggcattaaagcgaattttaaaattcgccacaacgtggaggatggcagcgtgcagctggctgatcactaccagcaaaacactccaatcggtgatggtcctgttctgctgccagacaatcactatctgagcacgcaaagcgttctgtctaaagatccgaacgagaaacgcgatcatatggttctgctggagttcgtaaccgcagcgggcatcacgcatggtatggatgaactgtacaaatgataa

SEQ ID NO: 873 - protein, 331 aa, synthetic construct
MALPVTALLLPLALLLHAARPQPVLTQSPSVSVSPGQTASITCSGDKLGDTYACWYQQKPGQSPVLVIYQDTKRPSGIPERFSGSNSGNTATLTISGTQAMDEADYYCQAWDSSTVVFGGGTKLTVLGGGGSGGGGSGGGGSQVQLVESEGGLVQPGGSLRLSCAASGFTFSSYEMNWVRQAPGKGLEWVSYISSSGSTIYYADSVKGRFTISRDNAKNSLYLQMNSLRAEDTAVYYCAREAKGYYYGMDVWGQGTTVTVSSTTTPAPRPPTPAPTIASQPLSLRPEACRPAAGGAVHTRGLDFACDIYIWAPLAGTCGVLLLSLVITLYC

SEQ ID NO: 874 - DNA, 993 bp, synthetic construct
  source 1..993: mol_type = other DNA
atggcactccccgtaactgctctgctgctgccgttggcattgctcctgcacgccgcacgcccgcagcctgtgctgactcagtcaccctcagtgtccgtgtccccaggacagacagccagcatcacctgctctggagataaattgggggatacatatgcttgctggtatcagcagaagccaggccagtcccctgtgctggtcatctatcaagataccaagcggccctcagggatccctgagcgattctctggctccaactctgggaacacagccactctgaccatcagcgggacccaggctatggatgaggctgactattactgtcaggcgtgggacagcagcactgtggtattcggcggagggaccaagctgaccgtcctaggtggtggcggatccggtggtggcggttctggtggtggcggctcccaggtgcagctggtggagtctgagggaggcttggtacagcctggagggtccctgagactctcctgtgcagcctctggattcaccttcagtagttatgaaatgaactgggtccgccaggctccagggaaggggctggagtgggtttcatacattagtagtagtggtagtaccatatactacgcagactctgtgaagggccgattcaccatctccagagacaacgccaagaactcactgtatctgcaaatgaacagcctgagagccgaggacacggctgtttattactgtgcgagagaggccaaggggtactactacggtatggacgtctggggccaagggaccacggtcaccgtctcgagtaccacgacgccagcgccgcgaccaccaacaccggcgcccaccatcgcgtcgcagcccctgtccctgcgcccagaggcgtgccggccagcggcggggggcgcagtgcacacgagggggctggacttcgcctgtgatatctacatctgggcgcccttggccgggacttgtggggtccttctcctgtcactggttatcaccctttactgc

SEQ ID NO: 875 - protein, 699 aa, synthetic construct
MALPVTALLLPLALLLHAARPQLTTESMPFNVAEGKEVLLLVHNLPQQLFGYSWYKGERVDGNRQIVGYAIGTQQATPGPANSGRETIYPNASLLIQNVTQNDTGFYTLQVIKSDLVNEEATGQFHVYPELPKPSISSNNSNPVEDKDAVAFTCEPETQDTTYLWWINNQSLPVSPRLQLSNGNRTLTLLSVTRNDTGPYECEIQNPVSANRSDPVTLNVTYGPDTPTISPSDTYYRPGANLSLSCYAASNPPAQYSWLINGTFQQSTQELFIPNITVNNSGSYTCHANNSVTGCNRTTVKTIIVTELSPVVAKPQIKASKTTVTGDKDSVNLTCSTNDTGISIRWFFKNQSLPSSERMKLSQGNTTLSINPVKREDAGTYWCEVFNPISKNQSDPIMLNVNYNALPQENGLSPGAIAGIVIGVVALVALIAVALACFLGGGGSGGGGSGGGGSGGGGSGSMRKGEELFTGVVPILVELDGDVNGHKFSVRGEGEGDATNGKLTLKFICTTGKLPVPWPTLVTTLTYGVQCFARYPDHMKQHDFFKSAMPEGYVQERTISFKDDGTYKTRAEVKFEGDTLVNRIELKGIDFKEDGNILGHKLEYNFNSHNVYITADKQKNGIKANFKIRHNVEDGSVQLADHYQQNTPIGDGPVLLPDNHYLSTQSVLSKDPNEKRDHMVLLEFVTAAGITHGMDELYK

SEQ ID NO: 876 - DNA, 2103 bp, synthetic construct
  source 1..2103: mol_type = other DNA
atggcactccccgtaactgctctgctgctgccgttggcattgctcctgcacgccgcacgcccgcagctcactactgaatccatgccattcaatgttgcagaggggaaggaggttcttctccttgtccacaatctgccccagcaactttttggctacagctggtacaaaggggaaagagtggatggcaaccgtcaaattgtaggatatgcaataggaactcaacaagctaccccagggcccgcaaacagcggtcgagagacaatataccccaatgcatccctgctgatccagaacgtcacccagaatgacacaggattctacaccctacaagtcataaagtcagatcttgtgaatgaagaagcaactggacagttccatgtatacccggagctgcccaagccctccatctccagcaacaactccaaccctgtggaggacaaggatgctgtggccttcacctgtgaacctgagactcaggacacaacctacctgtggtggataaacaatcagagcctcccggtcagtcccaggctgcagctgtccaatggcaacaggaccctcactctactcagtgtcacaaggaatgacacaggaccctatgagtgtgaaatacagaacccagtgagtgcgaaccgcagtgacccagtcaccttgaatgtcacctatggcccggacacccccaccatttccccttcagacacctattaccgtccaggggcaaacctcagcctctcctgctatgcagcctctaacccacctgcacagtactcctggcttatcaatggaacattccagcaaagcacacaagagctctttatccctaacatcactgtgaataatagtggatcctatacctgccacgccaataactcagtcactggctgcaacaggaccacagtcaagacgatcatagtcactgagctaagtccagtagtagcaaagccccaaatcaaagccagcaagaccacagtcacaggagataaggactctgtgaacctgacctgctccacaaatgacactggaatctccatccgttggttcttcaaaaaccagagtctcccgtcctcggagaggatgaagctgtcccagggcaacaccaccctcagcataaaccctgtcaagagggaggatgctgggacgtattggtgtgaggtcttcaacccaatcagtaagaaccaaagcgaccccatcatgctgaacgtaaactataatgctctaccacaagaaaatggcctctcacctggggccattgctggcattgtgattggagtagtggccctggttgctctgatagcagtagccctggcatgttttctgggtggtggcggttctggtggtggcggtagtggcggcggaggaagcggtggtggcggttccggatctatgcgtaaaggcgaagagctgttcactggtgtcgtccctattctggtggaactggatggtgatgtcaacggtcataagttttccgtgcgtggcgagggtgaaggtgacgcaactaatggtaaactgacgctgaagttcatctgtactactggtaaactgccggtaccttggccgactctggtaacgacgctgacttatggtgttcagtgctttgctcgttatccggaccatatgaagcagcatgacttcttcaagtccgccatgccggaaggctatgtgcaggaacgcacgatttcctttaaggatgacggcacgtacaaaacgcgtgcggaagtgaaatttgaaggcgataccctggtaaaccgcattgagctgaaaggcattgactttaaagaagacggcaatatcctgggccataagctggaatacaattttaacagccacaatgtttacatcaccgccgataaacaaaaaaatggcattaaagcgaattttaaaattcgccacaacgtggaggatggcagcgtgcagctggctgatcactaccagcaaaacactccaatcggtgatggtcctgttctgctgccagacaatcactatctgagcacgcaaagcgttctgtctaaagatccgaacgagaaacgcgatcatatggttctgctggagttcgtaaccgcagcgggcatcacgcatggtatggatgaactgtacaaatgataa

SEQ ID NO: 877 - protein, 439 aa, synthetic construct
MALPVTALLLPLALLLHAARPQLTTESMPFNVAEGKEVLLLVHNLPQQLFGYSWYKGERVDGNRQIVGYAIGTQQATPGPANSGRETIYPNASLLIQNVTQNDTGFYTLQVIKSDLVNEEATGQFHVYPELPKPSISSNNSNPVEDKDAVAFTCEPETQDTTYLWWINNQSLPVSPRLQLSNGNRTLTLLSVTRNDTGPYECEIQNPVSANRSDPVTLNVTYGPDTPTISPSDTYYRPGANLSLSCYAASNPPAQYSWLINGTFQQSTQELFIPNITVNNSGSYTCHANNSVTGCNRTTVKTIIVTELSPVVAKPQIKASKTTVTGDKDSVNLTCSTNDTGISIRWFFKNQSLPSSERMKLSQGNTTLSINPVKREDAGTYWCEVFNPISKNQSDPIMLNVNYNALPQENGLSPGAIAGIVIGVVALVALIAVALACFL

SEQ ID NO: 878 - DNA, 1317 bp, synthetic construct
  source 1..1317: mol_type = other DNA
atggcactccccgtaactgctctgctgctgccgttggcattgctcctgcacgccgcacgcccgcagctcactactgaatccatgccattcaatgttgcagaggggaaggaggttcttctccttgtccacaatctgccccagcaactttttggctacagctggtacaaaggggaaagagtggatggcaaccgtcaaattgtaggatatgcaataggaactcaacaagctaccccagggcccgcaaacagcggtcgagagacaatataccccaatgcatccctgctgatccagaacgtcacccagaatgacacaggattctacaccctacaagtcataaagtcagatcttgtgaatgaagaagcaactggacagttccatgtatacccggagctgcccaagccctccatctccagcaacaactccaaccctgtggaggacaaggatgctgtggccttcacctgtgaacctgagactcaggacacaacctacctgtggtggataaacaatcagagcctcccggtcagtcccaggctgcagctgtccaatggcaacaggaccctcactctactcagtgtcacaaggaatgacacaggaccctatgagtgtgaaatacagaacccagtgagtgcgaaccgcagtgacccagtcaccttgaatgtcacctatggcccggacacccccaccatttccccttcagacacctattaccgtccaggggcaaacctcagcctctcctgctatgcagcctctaacccacctgcacagtactcctggcttatcaatggaacattccagcaaagcacacaagagctctttatccctaacatcactgtgaataatagtggatcctatacctgccacgccaataactcagtcactggctgcaacaggaccacagtcaagacgatcatagtcactgagctaagtccagtagtagcaaagccccaaatcaaagccagcaagaccacagtcacaggagataaggactctgtgaacctgacctgctccacaaatgacactggaatctccatccgttggttcttcaaaaaccagagtctcccgtcctcggagaggatgaagctgtcccagggcaacaccaccctcagcataaaccctgtcaagagggaggatgctgggacgtattggtgtgaggtcttcaacccaatcagtaagaaccaaagcgaccccatcatgctgaacgtaaactataatgctctaccacaagaaaatggcctctcacctggggccattgctggcattgtgattggagtagtggccctggttgctctgatagcagtagccctggcatgttttctg

SEQ ID NO: 879 - protein, 628 aa, synthetic construct
MALPVTALLLPLALLLHAARPWPPPGTGDVVVQAPTQVPGFLGDSVTLPCYLQVPNMEVTHVSRLTWARHGESGAMAVFHQTQGPAYSESKRLEFVAARLGAELRNASLRMFGLRVEDEGNYTCLFVTFPQGSRSVDIWLRVLAKPQNTAEVQKVQLTGEPVPMARCVSTGGRPPAQITWHSDLGGMPNTSQVPGFLSGTVTVTSLWILVPSSQVDGKNVTCKVEHESFEKPQLLTVNLTVYYPPEVSISGYDNNWYLGQNEATLTCDARSNPEPTGYNWSTTMGPLPPFAVAQGAQLLIRPVDKPINTTLICNVTNALGARQAELTVQVKEGPPSEHSGISRNAIIFLVLGILVFLILLGIGIYFYWGGGGSGGGGSGGGGSGGGGSGSMRKGEELFTGVVPILVELDGDVNGHKFSVRGEGEGDATNGKLTLKFICTTGKLPVPWPTLVTTLTYGVQCFARYPDHMKQHDFFKSAMPEGYVQERTISFKDDGTYKTRAEVKFEGDTLVNRIELKGIDFKEDGNILGHKLEYNFNSHNVYITADKQKNGIKANFKIRHNVEDGSVQLADHYQQNTPIGDGPVLLPDNHYLSTQSVLSKDPNEKRDHMVLLEFVTAAGITHGMDELYK

SEQ ID NO: 880 - DNA, 1890 bp, synthetic construct
  source 1..1890: mol_type = other DNA
atggcactccccgtaactgctctgctgctgccgttggcattgctcctgcacgccgcacgcccgtggccacccccaggaaccggggacgtcgtcgtgcaggcgcccacccaggtgcccggcttcttgggcgactccgtgacgctgccctgctacctacaggtgcccaacatggaggtgacgcatgtgtcacggctgacttgggcgcggcatggtgaatctggcgccatggccgtcttccaccaaacgcagggccccgcctattcggagtccaaacggctggaattcgtggcagccagactgggcgcggagctgcggaatgcctcgctgaggatgttcgggttgcgcgtagaggatgaaggcaactacacctgcctgttcgtcacgttcccgcagggcagcaggagcgtggatatctggctccgagtgcttgccaagccccagaacacagctgaggttcagaaggtccagctcactggagagccagtgcccatggcccgctgcgtctccacagggggtcgcccgccagcccaaatcacctggcactcagacctgggcgggatgcccaatacgagccaggtgccagggttcctgtctggcacagtcactgtcaccagcctctggatattggtgccctcaagccaggtggacggcaagaatgtgacctgcaaggtggagcacgagagctttgagaagcctcagctgctgactgtgaacctcaccgtgtactaccccccagaggtatccatctctggctatgataacaactggtaccttggccagaatgaggccaccctgacctgcgatgctcgcagcaacccagagcccacaggctataattggagcacgaccatgggtcccctgccaccctttgctgtggcccagggcgcccagctcctgatccgtcctgtggacaaaccaatcaacacaactttaatctgcaacgtcaccaatgccctaggagctcgccaggcagaactgaccgtccaggtcaaagagggacctcccagtgagcactcaggcatctcccgtaacgccatcatcttcctggttctgggaatcctggtttttctgatcctgctggggatcgggatttatttctattggggtggtggcggttctggtggtggcggtagtggcggcggaggaagcggtggtggcggttccggatctatgcgtaaaggcgaagagctgttcactggtgtcgtccctattctggtggaactggatggtgatgtcaacggtcataagttttccgtgcgtggcgagggtgaaggtgacgcaactaatggtaaactgacgctgaagttcatctgtactactggtaaactgccggtaccttggccgactctggtaacgacgctgacttatggtgttcagtgctttgctcgttatccggaccatatgaagcagcatgacttcttcaagtccgccatgccggaaggctatgtgcaggaacgcacgatttcctttaaggatgacggcacgtacaaaacgcgtgcggaagtgaaatttgaaggcgataccctggtaaaccgcattgagctgaaaggcattgactttaaagaagacggcaatatcctgggccataagctggaatacaattttaacagccacaatgtttacatcaccgccgataaacaaaaaaatggcattaaagcgaattttaaaattcgccacaacgtggaggatggcagcgtgcagctggctgatcactaccagcaaaacactccaatcggtgatggtcctgttctgctgccagacaatcactatctgagcacgcaaagcgttctgtctaaagatccgaacgagaaacgcgatcatatggttctgctggagttcgtaaccgcagcgggcatcacgcatggtatggatgaactgtacaaatgataa

SEQ ID NO: 881 - protein, 368 aa, synthetic construct
MALPVTALLLPLALLLHAARPWPPPGTGDVVVQAPTQVPGFLGDSVTLPCYLQVPNMEVTHVSRLTWARHGESGAMAVFHQTQGPAYSESKRLEFVAARLGAELRNASLRMFGLRVEDEGNYTCLFVTFPQGSRSVDIWLRVLAKPQNTAEVQKVQLTGEPVPMARCVSTGGRPPAQITWHSDLGGMPNTSQVPGFLSGTVTVTSLWILVPSSQVDGKNVTCKVEHESFEKPQLLTVNLTVYYPPEVSISGYDNNWYLGQNEATLTCDARSNPEPTGYNWSTTMGPLPPFAVAQGAQLLIRPVDKPINTTLICNVTNALGARQAELTVQVKEGPPSEHSGISRNAIIFLVLGILVFLILLGIGIYFYW

SEQ ID NO: 882 - DNA, 1104 bp, synthetic construct
  source 1..1104: mol_type = other DNA
atggcactccccgtaactgctctgctgctgccgttggcattgctcctgcacgccgcacgcccgtggccacccccaggaaccggggacgtcgtcgtgcaggcgcccacccaggtgcccggcttcttgggcgactccgtgacgctgccctgctacctacaggtgcccaacatggaggtgacgcatgtgtcacggctgacttgggcgcggcatggtgaatctggcgccatggccgtcttccaccaaacgcagggccccgcctattcggagtccaaacggctggaattcgtggcagccagactgggcgcggagctgcggaatgcctcgctgaggatgttcgggttgcgcgtagaggatgaaggcaactacacctgcctgttcgtcacgttcccgcagggcagcaggagcgtggatatctggctccgagtgcttgccaagccccagaacacagctgaggttcagaaggtccagctcactggagagccagtgcccatggcccgctgcgtctccacagggggtcgcccgccagcccaaatcacctggcactcagacctgggcgggatgcccaatacgagccaggtgccagggttcctgtctggcacagtcactgtcaccagcctctggatattggtgccctcaagccaggtggacggcaagaatgtgacctgcaaggtggagcacgagagctttgagaagcctcagctgctgactgtgaacctcaccgtgtactaccccccagaggtatccatctctggctatgataacaactggtaccttggccagaatgaggccaccctgacctgcgatgctcgcagcaacccagagcccacaggctataattggagcacgaccatgggtcccctgccaccctttgctgtggcccagggcgcccagctcctgatccgtcctgtggacaaaccaatcaacacaactttaatctgcaacgtcaccaatgccctaggagctcgccaggcagaactgaccgtccaggtcaaagagggacctcccagtgagcactcaggcatctcccgtaacgccatcatcttcctggttctgggaatcctggtttttctgatcctgctggggatcgggatttatttctattgg

SEQ ID NO: 883 - protein, 874 aa, synthetic construct
MALPVTALLLPLALLLHAARPQENSFTINSVDMKSLPDWTVQNGKNLTLQCFADVSTTSHVKPQHQMLFYKDDVLFYNISSMKSTESYFIPEVRIYDSGTYKCTVIVNNKEKTTAEYQVLVEGVPSPRVTLDKKEAIQGGIVRVNCSVPEEKAPIHFTIEKLELNEKMVKLKREKNSRDQNFVILEFPVEEQDRVLSFRCQARIISGIHMQTSESTKSELVTVTESFSTPKFHISPTGMIMEGAQLHIKCTIQVTHLAQEFPEIIIQKDKAIVAHNRHGNKAVYSVMAMVEHSGNYTCKVESSRISKVSSIVVNITELFSKPELESSFTHLDQGERLNLSCSIPGAPPANFTIQKEDTIVSQTQDFTKIASKSDSGTYICTAGIDKVVKKSNTVQIVVCEMLSQPRISYDAQFEVIKGQTIEVRCESISGTLPISYQLLKTSKVLENSTKNSNDPAVFKDNPTEDVEYQCVADNCHSHAKMLSEVLRVKVIAPVDEVQISILSSKVVESGEDIVLQCAVNEGSGPITYKFYREKEGKPFYQMTSNATQAFWTKQKASKEQEGEYYCTAFNRANHASSVPRSKILTVRVILAPWKKGLIAVVIIGVIIALLIIAAGGGGSGGGGSGGGGSGGGGSGSMRKGEELFTGVVPILVELDGDVNGHKFSVRGEGEGDATNGKLTLKFICTTGKLPVPWPTLVTTLTYGVQCFARYPDHMKQHDFFKSAMPEGYVQERTISFKDDGTYKTRAEVKFEGDTLVNRIELKGIDFKEDGNILGHKLEYNFNSHNVYITADKQKNGIKANFKIRHNVEDGSVQLADHYQQNTPIGDGPVLLPDNHYLSTQSVLSKDPNEKRDHMVLLEFVTAAGITHGMDELYK

SEQ ID NO: 884 - DNA, 2628 bp, synthetic construct
  source 1..2628: mol_type = other DNA
atggcactccccgtaactgctctgctgctgccgttggcattgctcctgcacgccgcacgcccgcaagaaaactctttcacaatcaacagtgttgacatgaagagcctgccggactggacggtgcaaaatgggaagaacctgaccctgcagtgcttcgcggatgtcagcaccacctctcacgtcaagcctcagcaccagatgctgttctataaggatgacgtgctgttttacaacatctcctccatgaagagcacagagagttattttattcctgaagtccggatctatgactcagggacatataaatgtactgtgattgtgaacaacaaagagaaaaccactgcagagtaccaggtgttggtggaaggagtgcccagtcccagggtgacactggacaagaaagaggccatccaaggtgggatcgtgagggtcaactgttctgtcccagaggaaaaggccccaatacacttcacaattgaaaaacttgaactaaatgaaaaaatggtcaagctgaaaagagagaagaattctcgagaccagaattttgtgatactggaattccccgttgaggaacaggaccgcgttttatccttccgatgtcaagctaggatcatttctgggatccatatgcagacctcagaatctaccaagagtgaactggtcaccgtgacggaatccttctctacacccaagttccacatcagccccaccggaatgatcatggaaggagctcagctccacattaagtgcaccattcaagtgactcacctggcccaggagtttccagaaatcataattcagaaggacaaggcgattgtggcccacaacagacatggcaacaaggctgtgtactcagtcatggccatggtggagcacagtggcaactacacgtgcaaagtggagtccagccgcatatccaaggtcagcagcatcgtggtcaacataacagaactattttccaagcccgaactggaatcttccttcacacatctggaccaaggtgaaagactgaacctgtcctgctccatcccaggagcacctccagccaacttcaccatccagaaggaagatacgattgtgtcacagactcaagatttcaccaagatagcctcaaagtcggacagtgggacgtatatctgcactgcaggtattgacaaagtggtcaagaaaagcaacacagtccagatagtcgtatgtgaaatgctctcccagcccaggatttcttatgatgcccagtttgaggtcataaaaggacagaccatcgaagtccgttgcgaatcgatcagtggaactttgcctatttcttaccaacttttaaaaacaagtaaagttttggagaatagtaccaagaactcaaatgatcctgcggtattcaaagacaaccccactgaagacgtcgaataccagtgtgttgcagataattgccattcccatgccaaaatgttaagtgaggttctgagggtgaaggtgatagccccggtggatgaggtccagatttctatcctgtcaagtaaggtggtggagtctggagaggacattgtgctgcaatgtgctgtgaatgaaggatctggtcccatcacctataagttttacagagaaaaagagggcaaacccttctatcaaatgacctcaaatgccacccaggcattttggaccaagcagaaggctagcaaggaacaggagggagagtattactgcacagccttcaacagagccaaccacgcctccagtgtccccagaagcaaaatactgacagtcagagtcattcttgccccatggaagaaaggacttattgcagtggttatcatcggagtgatcattgctctcttgatcattgcggccggtggtggcggttctggtggtggcggtagtggcggcggaggaagcggtggtggcggttccggatctatgcgtaaaggcgaagagctgttcactggtgtcgtccctattctggtggaactggatggtgatgtcaacggtcataagttttccgtgcgtggcgagggtgaaggtgacgcaactaatggtaaactgacgctgaagttcatctgtactactggtaaactgccggtaccttggccgactctggtaacgacgctgacttatggtgttcagtgctttgctcgttatccggaccatatgaagcagcatgacttcttcaagtccgccatgccggaaggctatgtgcaggaacgcacgatttcctttaaggatgacggcacgtacaaaacgcgtgcggaagtgaaatttgaaggcgataccctggtaaaccgcattgagctgaaaggcattgactttaaagaagacggcaatatcctgggccataagctggaatacaattttaacagccacaatgtttacatcaccgccgataaacaaaaaaatggcattaaagcgaattttaaaattcgccacaacgtggaggatggcagcgtgcagctggctgatcactaccagcaaaacactccaatcggtgatggtcctgttctgctgccagacaatcactatctgagcacgcaaagcgttctgtctaaagatccgaacgagaaacgcgatcatatggttctgctggagttcgtaaccgcagcgggcatcacgcatggtatggatgaactgtacaaatgataa

SEQ ID NO: 885 - protein, 614 aa, synthetic construct
MALPVTALLLPLALLLHAARPQENSFTINSVDMKSLPDWTVQNGKNLTLQCFADVSTTSHVKPQHQMLFYKDDVLFYNISSMKSTESYFIPEVRIYDSGTYKCTVIVNNKEKTTAEYQVLVEGVPSPRVTLDKKEAIQGGIVRVNCSVPEEKAPIHFTIEKLELNEKMVKLKREKNSRDQNFVILEFPVEEQDRVLSFRCQARIISGIHMQTSESTKSELVTVTESFSTPKFHISPTGMIMEGAQLHIKCTIQVTHLAQEFPEIIIQKDKAIVAHNRHGNKAVYSVMAMVEHSGNYTCKVESSRISKVSSIVVNITELFSKPELESSFTHLDQGERLNLSCSIPGAPPANFTIQKEDTIVSQTQDFTKIASKSDSGTYICTAGIDKVVKKSNTVQIVVCEMLSQPRISYDAQFEVIKGQTIEVRCESISGTLPISYQLLKTSKVLENSTKNSNDPAVFKDNPTEDVEYQCVADNCHSHAKMLSEVLRVKVIAPVDEVQISILSSKVVESGEDIVLQCAVNEGSGPITYKFYREKEGKPFYQMTSNATQAFWTKQKASKEQEGEYYCTAFNRANHASSVPRSKILTVRVILAPWKKGLIAVVIIGVIIALLIIAA

SEQ ID NO: 886 - DNA, 1842 bp, synthetic construct
  source 1..1842: mol_type = other DNA
atggcactccccgtaactgctctgctgctgccgttggcattgctcctgcacgccgcacgcccgcaagaaaactctttcacaatcaacagtgttgacatgaagagcctgccggactggacggtgcaaaatgggaagaacctgaccctgcagtgcttcgcggatgtcagcaccacctctcacgtcaagcctcagcaccagatgctgttctataaggatgacgtgctgttttacaacatctcctccatgaagagcacagagagttattttattcctgaagtccggatctatgactcagggacatataaatgtactgtgattgtgaacaacaaagagaaaaccactgcagagtaccaggtgttggtggaaggagtgcccagtcccagggtgacactggacaagaaagaggccatccaaggtgggatcgtgagggtcaactgttctgtcccagaggaaaaggccccaatacacttcacaattgaaaaacttgaactaaatgaaaaaatggtcaagctgaaaagagagaagaattctcgagaccagaattttgtgatactggaattccccgttgaggaacaggaccgcgttttatccttccgatgtcaagctaggatcatttctgggatccatatgcagacctcagaatctaccaagagtgaactggtcaccgtgacggaatccttctctacacccaagttccacatcagccccaccggaatgatcatggaaggagctcagctccacattaagtgcaccattcaagtgactcacctggcccaggagtttccagaaatcataattcagaaggacaaggcgattgtggcccacaacagacatggcaacaaggctgtgtactcagtcatggccatggtggagcacagtggcaactacacgtgcaaagtggagtccagccgcatatccaaggtcagcagcatcgtggtcaacataacagaactattttccaagcccgaactggaatcttccttcacacatctggaccaaggtgaaagactgaacctgtcctgctccatcccaggagcacctccagccaacttcaccatccagaaggaagatacgattgtgtcacagactcaagatttcaccaagatagcctcaaagtcggacagtgggacgtatatctgcactgcaggtattgacaaagtggtcaagaaaagcaacacagtccagatagtcgtatgtgaaatgctctcccagcccaggatttcttatgatgcccagtttgaggtcataaaaggacagaccatcgaagtccgttgcgaatcgatcagtggaactttgcctatttcttaccaacttttaaaaacaagtaaagttttggagaatagtaccaagaactcaaatgatcctgcggtattcaaagacaaccccactgaagacgtcgaataccagtgtgttgcagataattgccattcccatgccaaaatgttaagtgaggttctgagggtgaaggtgatagccccggtggatgaggtccagatttctatcctgtcaagtaaggtggtggagtctggagaggacattgtgctgcaatgtgctgtgaatgaaggatctggtcccatcacctataagttttacagagaaaaagagggcaaacccttctatcaaatgacctcaaatgccacccaggcattttggaccaagcagaaggctagcaaggaacaggagggagagtattactgcacagccttcaacagagccaaccacgcctccagtgtccccagaagcaaaatactgacagtcagagtcattcttgccccatggaagaaaggacttattgcagtggttatcatcggagtgatcattgctctcttgatcattgcggcc

SEQ ID NO: 887 - protein, 627 aa, synthetic construct
MALPVTALLLPLALLLHAARPQVVQVNDSMYGFIGTDVVLHCSFANPLPSVKITQVTWQKSTNGSKQNVAIYNPSMGVSVLAPYRERVEFLRPSFTDGTIRLSRLELEDEGVYICEFATFPTGNRESQLNLTVMAKPTNWIEGTQAVLRAKKGQDDKVLVATCTSANGKPPSVVSWETRLKGEAEYQEIRNPNGTVTVISRYRLVPSREAHQQSLACIVNYHMDRFKESLTLNVQYEPEVTIEGFDGNWYLQRMDVKLTCKADANPPATEYHWTTLNGSLPKGVEAQNRTLFFKGPINYSLAGTYICEATNPIGTRSGQVEVNITEFPYTPSPPEHGRRAGPVPTAIIGGVAGSILLVLIVVGGIVVGGGGSGGGGSGGGGSGGGGSGSMRKGEELFTGVVPILVELDGDVNGHKFSVRGEGEGDATNGKLTLKFICTTGKLPVPWPTLVTTLTYGVQCFARYPDHMKQHDFFKSAMPEGYVQERTISFKDDGTYKTRAEVKFEGDTLVNRIELKGIDFKEDGNILGHKLEYNFNSHNVYITADKQKNGIKANFKIRHNVEDGSVQLADHYQQNTPIGDGPVLLPDNHYLSTQSVLSKDPNEKRDHMVLLEFVTAAGITHGMDELYK

SEQ ID NO: 888 - DNA, 1887 bp, synthetic construct
  source 1..1887: mol_type = other DNA
atggcactccccgtaactgctctgctgctgccgttggcattgctcctgcacgccgcacgcccgcaggtggtccaggtgaacgactccatgtatggcttcatcggcacagacgtggttctgcactgcagctttgccaacccgcttcccagcgtgaagatcacccaggtcacatggcagaagtccaccaatggctccaagcagaacgtggccatctacaacccatccatgggcgtgtccgtgctggctccctaccgcgagcgtgtggaattcctgcggccctccttcaccgatggcactatccgcctctcccgcctggagctggaggatgagggtgtctacatctgcgagtttgctaccttccctacgggcaatcgagaaagccagctcaatctcacggtgatggccaaacccaccaattggatagagggtacccaggcagtgcttcgagccaagaaggggcaggatgacaaggtcctggtggccacctgcacctcagccaatgggaagcctcccagtgtggtatcctgggaaactcggttaaaaggtgaggcagagtaccaggagatccggaaccccaatggcacagtgacggtcatcagccgctaccgcctggtgcccagcagggaagcccaccagcagtccttggcctgcatcgtcaactaccacatggaccgcttcaaggaaagcctcactctcaacgtgcagtatgagcctgaggtaaccattgaggggtttgatggcaactggtacctgcagcggatggacgtgaagctcacctgcaaagctgatgctaaccccccagccactgagtaccactggaccacgctaaatggctctctccccaagggtgtggaggcccagaacagaaccctcttcttcaagggacccatcaactacagcctggcagggacctacatctgtgaggccaccaaccccatcggtacacgctcaggccaggtggaggtcaatatcacagaattcccctacaccccgtctcctcccgaacatgggcggcgcgccgggccggtgcccacggccatcattgggggcgtggcggggagcatcctgctggtgttgattgtggtcggcgggatcgtggtcggtggtggcggttctggtggtggcggtagtggcggcggaggaagcggtggtggcggttccggatctatgcgtaaaggcgaagagctgttcactggtgtcgtccctattctggtggaactggatggtgatgtcaacggtcataagttttccgtgcgtggcgagggtgaaggtgacgcaactaatggtaaactgacgctgaagttcatctgtactactggtaaactgccggtaccttggccgactctggtaacgacgctgacttatggtgttcagtgctttgctcgttatccggaccatatgaagcagcatgacttcttcaagtccgccatgccggaaggctatgtgcaggaacgcacgatttcctttaaggatgacggcacgtacaaaacgcgtgcggaagtgaaatttgaaggcgataccctggtaaaccgcattgagctgaaaggcattgactttaaagaagacggcaatatcctgggccataagctggaatacaattttaacagccacaatgtttacatcaccgccgataaacaaaaaaatggcattaaagcgaattttaaaattcgccacaacgtggaggatggcagcgtgcagctggctgatcactaccagcaaaacactccaatcggtgatggtcctgttctgctgccagacaatcactatctgagcacgcaaagcgttctgtctaaagatccgaacgagaaacgcgatcatatggttctgctggagttcgtaaccgcagcgggcatcacgcatggtatggatgaactgtacaaatgataa

SEQ ID NO: 889 - protein, 367 aa, synthetic construct
MALPVTALLLPLALLLHAARPQVVQVNDSMYGFIGTDVVLHCSFANPLPSVKITQVTWQKSTNGSKQNVAIYNPSMGVSVLAPYRERVEFLRPSFTDGTIRLSRLELEDEGVYICEFATFPTGNRESQLNLTVMAKPTNWIEGTQAVLRAKKGQDDKVLVATCTSANGKPPSVVSWETRLKGEAEYQEIRNPNGTVTVISRYRLVPSREAHQQSLACIVNYHMDRFKESLTLNVQYEPEVTIEGFDGNWYLQRMDVKLTCKADANPPATEYHWTTLNGSLPKGVEAQNRTLFFKGPINYSLAGTYICEATNPIGTRSGQVEVNITEFPYTPSPPEHGRRAGPVPTAIIGGVAGSILLVLIVVGGIVV

SEQ ID NO: 890 - DNA, 1101 bp, synthetic construct
  source 1..1101: mol_type = other DNA
atggcactccccgtaactgctctgctgctgccgttggcattgctcctgcacgccgcacgcccgcaggtggtccaggtgaacgactccatgtatggcttcatcggcacagacgtggttctgcactgcagctttgccaacccgcttcccagcgtgaagatcacccaggtcacatggcagaagtccaccaatggctccaagcagaacgtggccatctacaacccatccatgggcgtgtccgtgctggctccctaccgcgagcgtgtggaattcctgcggccctccttcaccgatggcactatccgcctctcccgcctggagctggaggatgagggtgtctacatctgcgagtttgctaccttccctacgggcaatcgagaaagccagctcaatctcacggtgatggccaaacccaccaattggatagagggtacccaggcagtgcttcgagccaagaaggggcaggatgacaaggtcctggtggccacctgcacctcagccaatgggaagcctcccagtgtggtatcctgggaaactcggttaaaaggtgaggcagagtaccaggagatccggaaccccaatggcacagtgacggtcatcagccgctaccgcctggtgcccagcagggaagcccaccagcagtccttggcctgcatcgtcaactaccacatggaccgcttcaaggaaagcctcactctcaacgtgcagtatgagcctgaggtaaccattgaggggtttgatggcaactggtacctgcagcggatggacgtgaagctcacctgcaaagctgatgctaaccccccagccactgagtaccactggaccacgctaaatggctctctccccaagggtgtggaggcccagaacagaaccctcttcttcaagggacccatcaactacagcctggcagggacctacatctgtgaggccaccaaccccatcggtacacgctcaggccaggtggaggtcaatatcacagaattcccctacaccccgtctcctcccgaacatgggcggcgcgccgggccggtgcccacggccatcattgggggcgtggcggggagcatcctgctggtgttgattgtggtcggcgggatcgtggtc

SEQ ID NO: 891 - protein, 510 aa, synthetic construct
MALPVTALLLPLALLLHAARPQVQVVTQDEREQLYTPASLKCSLQNAQEALIVTWQKKKAVSPENMVTFSENHGVVIQPAYKDKINITQLGLQNSTITFWNITLEDEGCYMCLFNTFGFGKISGTACLTVYVQPIVSLHYKFSEDHLNITCSATARPAPMVFWKVPRSGIENSTVTLSHPNGTTSVTSILHIKDPKNQVGKEVICQVLHLGTVTDFKQTVNKGYWFSVPLLLSIVSLVILLVLISILLYWGGGGSGGGGSGGGGSGGGGSGSMRKGEELFTGVVPILVELDGDVNGHKFSVRGEGEGDATNGKLTLKFICTTGKLPVPWPTLVTTLTYGVQCFARYPDHMKQHDFFKSAMPEGYVQERTISFKDDGTYKTRAEVKFEGDTLVNRIELKGIDFKEDGNILGHKLEYNFNSHNVYITADKQKNGIKANFKIRHNVEDGSVQLADHYQQNTPIGDGPVLLPDNHYLSTQSVLSKDPNEKRDHMVLLEFVTAAGITHGMDELYK

SEQ ID NO: 892 - DNA, 1536 bp, synthetic construct
  source 1..1536: mol_type = other DNA
atggcactccccgtaactgctctgctgctgccgttggcattgctcctgcacgccgcacgcccgcaagtgcaagtggtgacccaggatgaaagagagcagctgtacacacctgcttccttaaaatgctctctgcaaaatgcccaggaagccctcattgtgacatggcagaaaaagaaagctgtaagcccagaaaacatggtcaccttcagcgagaaccatggggtggtgatccagcctgcctataaggacaagataaacattacccagctgggactccaaaactcaaccatcaccttctggaatatcaccctggaggatgaagggtgttacatgtgtctcttcaatacctttggttttgggaagatctcaggaacggcctgcctcaccgtctatgtacagcccatagtatcccttcactacaaattctctgaagaccacctaaatatcacttgctctgccactgcccgcccagcccccatggtcttctggaaggtccctcggtcagggattgaaaatagtacagtgactctgtctcacccaaatgggaccacgtctgttaccagcatcctccatatcaaagaccctaagaatcaggtggggaaggaggtgatctgccaggtgctgcacctggggactgtgaccgactttaagcaaaccgtcaacaaaggctattggttttcagttccgctattgctaagcattgtttccctggtaattcttctcgtcctaatctcaatcttactgtactggggtggtggcggttctggtggtggcggtagtggcggcggaggaagcggtggtggcggttccggatctatgcgtaaaggcgaagagctgttcactggtgtcgtccctattctggtggaactggatggtgatgtcaacggtcataagttttccgtgcgtggcgagggtgaaggtgacgcaactaatggtaaactgacgctgaagttcatctgtactactggtaaactgccggtaccttggccgactctggtaacgacgctgacttatggtgttcagtgctttgctcgttatccggaccatatgaagcagcatgacttcttcaagtccgccatgccggaaggctatgtgcaggaacgcacgatttcctttaaggatgacggcacgtacaaaacgcgtgcggaagtgaaatttgaaggcgataccctggtaaaccgcattgagctgaaaggcattgactttaaagaagacggcaatatcctgggccataagctggaatacaattttaacagccacaatgtttacatcaccgccgataaacaaaaaaatggcattaaagcgaattttaaaattcgccacaacgtggaggatggcagcgtgcagctggctgatcactaccagcaaaacactccaatcggtgatggtcctgttctgctgccagacaatcactatctgagcacgcaaagcgttctgtctaaagatccgaacgagaaacgcgatcatatggttctgctggagttcgtaaccgcagcgggcatcacgcatggtatggatgaactgtacaaatgataa

SEQ ID NO: 893 - protein, 250 aa, synthetic construct
MALPVTALLLPLALLLHAARPQVQVVTQDEREQLYTPASLKCSLQNAQEALIVTWQKKKAVSPENMVTFSENHGVVIQPAYKDKINITQLGLQNSTITFWNITLEDEGCYMCLFNTFGFGKISGTACLTVYVQPIVSLHYKFSEDHLNITCSATARPAPMVFWKVPRSGIENSTVTLSHPNGTTSVTSILHIKDPKNQVGKEVICQVLHLGTVTDFKQTVNKGYWFSVPLLLSIVSLVILLVLISILLYW

SEQ ID NO: 894 - DNA, 750 bp, synthetic construct
  source 1..750: mol_type = other DNA
atggcactccccgtaactgctctgctgctgccgttggcattgctcctgcacgccgcacgcccgcaagtgcaagtggtgacccaggatgaaagagagcagctgtacacacctgcttccttaaaatgctctctgcaaaatgcccaggaagccctcattgtgacatggcagaaaaagaaagctgtaagcccagaaaacatggtcaccttcagcgagaaccatggggtggtgatccagcctgcctataaggacaagataaacattacccagctgggactccaaaactcaaccatcaccttctggaatatcaccctggaggatgaagggtgttacatgtgtctcttcaatacctttggttttgggaagatctcaggaacggcctgcctcaccgtctatgtacagcccatagtatcccttcactacaaattctctgaagaccacctaaatatcacttgctctgccactgcccgcccagcccccatggtcttctggaaggtccctcggtcagggattgaaaatagtacagtgactctgtctcacccaaatgggaccacgtctgttaccagcatcctccatatcaaagaccctaagaatcaggtggggaaggaggtgatctgccaggtgctgcacctggggactgtgaccgactttaagcaaaccgtcaacaaaggctattggttttcagttccgctattgctaagcattgtttccctggtaattcttctcgtcctaatctcaatcttactgtactgg

SEQ ID NO: 895 - protein, 21 aa, synthetic construct
MALPVTALLLPLALLLHAARP

SEQ ID NO: 896 - DNA, 63 bp, synthetic construct
  source 1..63: mol_type = other DNA
atggcactccccgtaactgctctgctgctgccgttggcattgctcctgcacgccgcacgcccg

SEQ ID NO: 897 - protein, 21 aa, synthetic construct
MALPVTALLLPLALLLHAARP

SEQ ID NO: 898 - DNA, 63 bp, synthetic construct; identical to SEQ ID NO: 896
  source 1..63: mol_type = other DNA

SEQ ID NO: 899 - protein, 374 aa, synthetic construct; identical to SEQ ID NO: 174

SEQ ID NO: 900 - protein, 481 aa, synthetic construct
MALPVTALLLPLALLLHAARPDIQMTQSPSSLSASVGDRVTITCRASQDISKYLNWYQQKPGGTVKLLIYHTSRLHSGVPSRFSGSGSGTDFTLTISSLQPEDIATYYCQQGNTLPYTFGGGTKLEITGGGGSGGGGSGGGGSQVQLQESGPGLVKPSQTLSLTCTVSGVSLPDYGVSWIRQPPGKGLEWIGVIWGSETTYYNSALKSRLTISKDNSKNQVSLKLSSVTAADTAVYYCAKHYYYGGSYAMDYWGQGTSVTVSSTTTPAPRPPTPAPTIASQPLSLRPEACRPAAGGAVHTRGLDFACDIYIWAPLAGTCGVLLLSLVITLYCRRDQRLPPDAHKPPGGGSFRTPIQEEQADAHSTLAKIRVKFSRSADAPAYQQGQNQLYNELNLGRREEYDVLDKRRGRDPEMGGKPRRKNPQEGLYNELQKDKMAEAYSEIGMKGERRRGKGHDGLYQGLSTATKDTYDALHMQALPPR

SEQ ID NO: 901 - protein, 481 aa, synthetic construct
MALPVTALLLPLALLLHAARPDIQMTQSPSSLSASVGDRVTITCRASQDISKYLNWYQQKPGGTVKLLIYHTSRLHSGVPSRFSGSGSGTDFTLTISSLQPEDIATYFCQQGNTLPYTFGGGTKLEITGGGGSGGGGSGGGGSQVQLQESGPGLVKPSQTLSLTCTVSGVSLPDYGVSWIRQPPGKGLEWIGVIWGSETTYYNSALKSRLTISKDNSKNQVSLKLSSVTAADTAVYYCAKHYYYGGSYAMDYWGQGTSVTVSSTTTPAPRPPTPAPTIASQPLSLRPEACRPAAGGAVHTRGLDFACDIYIWAPLAGTCGVLLLSLVITLYCRRDQRLPPDAHKPPGGGSFRTPIQEEQADAHSTLAKIRVKFSRSADAPAYQQGQNQLYNELNLGRREEYDVLDKRRGRDPEMGGKPRRKNPQEGLYNELQKDKMAEAYSEIGMKGERRRGKGHDGLYQGLSTATKDTYDALHMQALPPR

SEQ ID NO: 902 - protein, 481 aa, synthetic construct
MALPVTALLLPLALLLHAARPDIQMTQSPSSLSASVGDRVTITCRASQDISKYLNWYQQKPDGTVKLLIYHTSRLHSGVPSRFSGSGSGTDYTLTISSLQPEDIATYFCQQGNTLPYTFGGGTKLEITGGGGSGGGGSGGGGSQVQLQESGPGLVKPSQTLSLTCTVSGVSLPDYGVSWIRQPPGKGLEWIGVIWGSETTYYNSALKSRLTISKDNSKNQVSLKLSSVTAADTAVYYCAKHYYYGGSYAMDYWGQGTSVTVSSTTTPAPRPPTPAPTIASQPLSLRPEACRPAAGGAVHTRGLDFACDIYIWAPLAGTCGVLLLSLVITLYCRRDQRLPPDAHKPPGGGSFRTPIQEEQADAHSTLAKIRVKFSRSADAPAYQQGQNQLYNELNLGRREEYDVLDKRRGRDPEMGGKPRRKNPQEGLYNELQKDKMAEAYSEIGMKGERRRGKGHDGLYQGLSTATKDTYDALHMQALPPR

SEQ ID NO: 903 - protein, 481 aa, synthetic construct
MALPVTALLLPLALLLHAARPDIQMTQSPSSLSASVGDRVTITCRASQDISKYLNWYQQKPGGTVKLLIYHTSRLHSGVPSRFSGSGSGTDFTLTISSLQPEDIATYYCQQGNTLPYTFGGGTKLEITGGGGSGGGGSGGGGSQVQLQESGPGLVKPSQTLSLTCTVSGVSLPDYGVSWIRQPPGKGLEWLGVIWGSETTYYNSALKSRLTISKDNSKSQVSLKLSSVTAADTAVYYCAKHYYYGGSYAMDYWGQGTSVTVSSTTTPAPRPPTPAPTIASQPLSLRPEACRPAAGGAVHTRGLDFACDIYIWAPLAGTCGVLLLSLVITLYCRRDQRLPPDAHKPPGGGSFRTPIQEEQADAHSTLAKIRVKFSRSADAPAYQQGQNQLYNELNLGRREEYDVLDKRRGRDPEMGGKPRRKNPQEGLYNELQKDKMAEAYSEIGMKGERRRGKGHDGLYQGLSTATKDTYDALHMQALPPR

SEQ ID NO: 904 - protein, 482 aa, synthetic construct
MALPVTALLLPLALLLHAARPDIQMTQSPSSLSASVGDRVTITCRASQDISKYLNWYQQKPGGTVKLLIYHTSRLHSGVPSRFSGSGSGTDFTLTISSLQPEDIATYFCQQGNTLPYTFGGGTKLEITGGGGSGGGGSGGGGSQVQLQESGPGLVKPSQTLSLTCTVSGVSLPDYGVSWIRQPPGKGLEWLGVIWGSETTYYNSALKSRLTISKDNSKSQVSLKLSSVTAADTAVYYCAKHYYYGGSYAMDYWGQGTSVTVSSTTTPAPRPPTPAPTIASQPLSLRPEACRPAAGGAVHTRGLDFACDIYIWAPLAGTCGVLLLSLVITLYCRRDQRLPPDAHKPPGGGSFRTPIQEEQADAHSTLAKIRVKFSRSSADAPAYQQGQNQLYNELNLGRREEYDVLDKRRGRDPEMGGKPRRKNPQEGLYNELQKDKMAEAYSEIGMKGERRRGKGHDGLYQGLSTATKDTYDALHMQALPPR

SEQ ID NO: 905 - protein, 481 aa, synthetic construct
MALPVTALLLPLALLLHAARPDIQMTQSPSSLSASVGDRVTITCRASQDISKYLNWYQQKPDGTVKLLIYHTSRLHSGVPSRFSGSGSGTDYTLTISSLQPEDIATYFCQQGNTLPYTFGGGTKLEITGGGGSGGGGSGGGGSQVQLQESGPGLVKPSQTLSLTCTVSGVSLPDYGVSWIRQPPGKGLEWLGVIWGSETTYYNSALKSRLTISKDNSKSQVSLKLSSVTAADTAVYYCAKHYYYGGSYAMDYWGQGTSVTVSSTTTPAPRPPTPAPTIASQPLSLRPEACRPAAGGAVHTRGLDFACDIYIWAPLAGTCGVLLLSLVITLYCRRDQRLPPDAHKPPGGGSFRTPIQEEQADAHSTLAKIRVKFSRSADAPAYQQGQNQLYNELNLGRREEYDVLDKRRGRDPEMGGKPRRKNPQEGLYNELQKDKMAEAYSEIGMKGERRRGKGHDGLYQGLSTATKDTYDALHMQALPPR

SEQ ID NO: 906 - protein, 481 aa, synthetic construct
MALPVTALLLPLALLLHAARPDIQMTQSPSSLSASVGDRVTITCRASQDISKYLNWYQQKPGGTVKLLIYHTSRLHSGVPSRFSGSGSGTDFTLTISSLQPEDIATYYCQQGNTLPYTFGGGTKLEITGGGGSGGGGSGGGGSQVQLQESGPGLVKPSQTLSVTCTVSGVSLPDYGVSWIRQPPGKGLEWLGVIWGSETTYYNSALKSRLTISKDNSKSQVSLKLSSVTAADTAVYYCAKHYYYGGSYAMDYWGQGTSVTVSSTTTPAPRPPTPAPTIASQPLSLRPEACRPAAGGAVHTRGLDFACDIYIWAPLAGTCGVLLLSLVITLYCRRDQRLPPDAHKPPGGGSFRTPIQEEQADAHSTLAKIRVKFSRSADAPAYQQGQNQLYNELNLGRREEYDVLDKRRGRDPEMGGKPRRKNPQEGLYNELQKDKMAEAYSEIGMKGERRRGKGHDGLYQGLSTATKDTYDALHMQALPPR

SEQ ID NO: 907 - protein, 481 aa, synthetic construct
MALPVTALLLPLALLLHAARPDIQMTQSPSSLSASVGDRVTITCRASQDISKYLNWYQQKPGGTVKLLIYHTSRLHSGVPSRFSGSGSGTDFTLTISSLQPEDIATYFCQQGNTLPYTFGGGTKLEITGGGGSGGGGSGGGGSQVQLQESGPGLVKPSQTLSVTCTVSGVSLPDYGVSWIRQPPGKGLEWLGVIWGSETTYYNSALKSRLTISKDNSKSQVSLKLSSVTAADTAVYYCAKHYYYGGSYAMDYWGQGTSVTVSSTTTPAPRPPTPAPTIASQPLSLRPEACRPAAGGAVHTRGLDFACDIYIWAPLAGTCGVLLLSLVITLYCRRDQRLPPDAHKPPGGGSFRTPIQEEQADAHSTLAKIRVKFSRSADAPAYQQGQNQLYNELNLGRREEYDVLDKRRGRDPEMGGKPRRKNPQEGLYNELQKDKMAEAYSEIGMKGERRRGKGHDGLYQGLSTATKDTYDALHMQALPPR

SEQ ID NO: 908 - protein, 481 aa, synthetic construct
MALPVTALLLPLALLLHAARPDIQMTQSPSSLSASVGDRVTITCRASQDISKYLNWYQQKPDGTVKLLIYHTSRLHSGVPSRFSGSGSGTDYTLTISSLQPEDIATYFCQQGNTLPYTFGGGTKLEITGGGGSGGGGSGGGGSQVQLQESGPGLVKPSQTLSVTCTVSGVSLPDYGVSWIRQPPGKGLEWLGVIWGSETTYYNSALKSRLTISKDNSKSQVSLKLSSVTAADTAVYYCAKHYYYGGSYAMDYWGQGTSVTVSSTTTPAPRPPTPAPTIASQPLSLRPEACRPAAGGAVHTRGLDFACDIYIWAPLAGTCGVLLLSLVITLYCRRDQRLPPDAHKPPGGGSFRTPIQEEQADAHSTLAKIRVKFSRSADAPAYQQGQNQLYNELNLGRREEYDVLDKRRGRDPEMGGKPRRKNPQEGLYNELQKDKMAEAYSEIGMKGERRRGKGHDGLYQGLSTATKDTYDALHMQALPPR

SEQ ID NO: 909 - protein, 481 aa, synthetic construct
MALPVTALLLPLALLLHAARPDIQMTQSPSSLSASVGDRVTITCRASQDISKYLNWYQQKPGGTVKLLIYHTSRLHSGVPSRFSGSGSGTDFTLTISSLQPEDIATYYCQQGNTLPYTFGGGTKLEITGGGGSGGGGSGGGGSQVQLQESGPGLVKPSQTLSVTCTVSGVSLPDYGVSWIRQPPRKGLEWLGVIWGSETTYYNSALKSRLTISKDNSKSQVSLKMSSVTAADTAIYYCAKHYYYGGSYAMDYWGQGTSVTVSSTTTPAPRPPTPAPTIASQPLSLRPEACRPAAGGAVHTRGLDFACDIYIWAPLAGTCGVLLLSLVITLYCRRDQRLPPDAHKPPGGGSFRTPIQEEQADAHSTLAKIRVKFSRSADAPAYQQGQNQLYNELNLGRREEYDVLDKRRGRDPEMGGKPRRKNPQEGLYNELQKDKMAEAYSEIGMKGERRRGKGHDGLYQGLSTATKDTYDALHMQALPPR

SEQ ID NO: 910 - protein, 481 aa, synthetic construct
MALPVTALLLPLALLLHAARPDIQMTQSPSSLSASVGDRVTITCRASQDISKYLNWYQQKPGGTVKLLIYHTSRLHSGVPSRFSGSGSGTDFTLTISSLQPEDIATYFCQQGNTLPYTFGGGTKLEITGGGGSGGGGSGGGGSQVQLQESGPGLVKPSQTLSVTCTVSGVSLPDYGVSWIRQPPRKGLEWLGVIWGSETTYYNSALKSRLTISKDNSKSQVSLKMSSVTAADTAIYYCAKHYYYGGSYAMDYWGQGTSVTVSSTTTPAPRPPTPAPTIASQPLSLRPEACRPAAGGAVHTRGLDFACDIYIWAPLAGTCGVLLLSLVITLYCRRDQRLPPDAHKPPGGGSFRTPIQEEQADAHSTLAKIRVKFSRSADAPAYQQGQNQLYNELNLGRREEYDVLDKRRGRDPEMGGKPRRKNPQEGLYNELQKDKMAEAYSEIGMKGERRRGKGHDGLYQGLSTATKDTYDALHMQALPPR

SEQ ID NO: 911 - protein, 481 aa, synthetic construct
MALPVTALLLPLALLLHAARPDIQMTQSPSSLSASVGDRVTITCRASQDISKYLNWYQQKPDGTVKLLIYHTSRLHSGVPSRFSGSGSGTDYTLTISSLQPEDIATYFCQQGNTLPYTFGGGTKLEITGGGGSGGGGSGGGGSQVQLQESGPGLVKPSQTLSVTCTVSGVSLPDYGVSWIRQPPRKGLEWLGVIWGSETTYYNSALKSRLTISKDNSKSQVSLKMSSVTAADTAIYYCAKHYYYGGSYAMDYWGQGTSVTVSSTTTPAPRPPTPAPTIASQPLSLRPEACRPAAGGAVHTRGLDFACDIYIWAPLAGTCGVLLLSLVITLYCRRDQRLPPDAHKPPGGGSFRTPIQEEQADAHSTLAKIRVKFSRSADAPAYQQGQNQLYNELNLGRREEYDVLDKRRGRDPEMGGKPRRKNPQEGLYNELQKDKMAEAYSEIGMKGERRRGKGHDGLYQGLSTATKDTYDALHMQALPPR

SEQ ID NO: 912 - protein, 497 aa, synthetic construct
MALPVTALLLPLALLLHAARPDYKDDDDKGGGGSGGGGSQVQLVQSGAEVKKPGASVKVSCKASGYTFTGHYLHWVRQAPGQGLEWMGWINPNSGGTNYAQKFQGRVTMTRDTSTSTVYMELSSLRSEDTAVYYCVRGSGWYDLDYWGQGTLVTVSSGGGGSGGGGSGGGGSDIQMTQSPSSLSASVGDRVTITCRASQNIGTYLAWYQQKPGKAPKLLIYDASNLETGVPSRFSGSGSGTDFTLTISSLQPEDFATYYCQQSYRIPLTFGQGTRLEIKTTTPAPRPPTPAPTIASQPLSLRPEACRPAAGGAVHTRGLDFACDIYIWAPLAGTCGVLLLSLVITLYCRRDQRLPPDAHKPPGGGSFRTPIQEEQADAHSTLAKIRVKFSRSADAPAYQQGQNQLYNELNLGRREEYDVLDKRRGRDPEMGGKPRRKNPQEGLYNELQKDKMAEAYSEIGMKGERRRGKGHDGLYQGLSTATKDTYDALHMQALPPR

SEQ ID NO: 913 - protein, 498 aa, synthetic construct
MALPVTALLLPLALLLHAARPDYKDDDDKGGGGSGGGGSQVQLVQSGAEVKKPGASVKVSCKASGYTFTNYYMHWVRQAPGQGLEWMGIINPSGGSTSYAQKFQGRVTMTRDTSTSTVYMELSSLRSEDTAVYYCARELGVAGYFDLWGRGTLVTVSSGGGGSGGGGSGGGGSDIQMTQSPSSLSASVGDRVTITCRASQRISNWLAWYQQKPGKAPKLLIYDASNLETGVPSRFSGSGSGTDFTLTISSLQPEDFATYYCQQTYSPPPTFGQGTKLEIKTTTPAPRPPTPAPTIASQPLSLRPEACRPAAGGAVHTRGLDFACDIYIWAPLAGTCGVLLLSLVITLYCRRDQRLPPDAHKPPGGGSFRTPIQEEQADAHSTLAKIRVKFSRSADAPAYQQGQNQLYNELNLGRREEYDVLDKRRGRDPEMGGKPRRKNPQEGLYNELQKDKMAEAYSEIGMKGERRRGKGHDGLYQGLSTATKDTYDALHMQALPPR

SEQ ID NO: 914 - protein, 507 aa, synthetic construct
MALPVTALLLPLALLLHAARPDYKDDDDKGGGGSGGGGSQVQLVQSGAEVKKPGASVKVSCKASGYTFTGYYIHWVRQAPGQGLEWMGIINPSGGSTSYAQKFQGRVTMTRDTSTSTVYMELSSLRSEDTAVYYCARDLSGIDGYIGFFDYWGQGTLVTVSSGGGGSGGGGSGGGGSDIVMTQSPLSLPVTPGEPASISCRSSQSLLHSNGYNYLDWYLQKPGQSPQLLIYAASSLQSGVPDRFSGSGSGTDFTLKISRVEAEDVGVYYCMQALQTPITFGQGTRLEIKTTTPAPRPPTPAPTIASQPLSLRPEACRPAAGGAVHTRGLDFACDIYIWAPLAGTCGVLLLSLVITLYCRRDQRLPPDAHKPPGGGSFRTPIQEEQADAHSTLAKIRVKFSRSADAPAYQQGQNQLYNELNLGRREEYDVLDKRRGRDPEMGGKPRRKNPQEGLYNELQKDKMAEAYSEIGMKGERRRGKGHDGLYQGLSTATKDTYDALHMQALPPR

SEQ ID NO: 915 - protein, 498 aa, synthetic construct
MALPVTALLLPLALLLHAARPDYKDDDDKGGGGSGGGGSQVQLVQSGAEVKKPGASVKVSCKASGGTFRSHVISWVRQAPGQGLEWMGIIDPSGGSTSYAQRFQGRVTMTRDTSTSTVYMELSSLRSEDTAVYYCAKDYTGLLGMDVWGQGTTVTVSSGGGGSGGGGSGGGGSDIQMTQSPSSLSASVGDRVTITCRASQDIDTYLAWYQQKPGKAPKLLIYAASSLQSGVPSRFSGSGSGTDFTLTISSLQPEDFATYYCQQSYTTPFTFGQGTKVEIKTTTPAPRPPTPAPTIASQPLSLRPEACRPAAGGAVHTRGLDFACDIYIWAPLAGTCGVLLLSLVITLYCRRDQRLPPDAHKPPGGGSFRTPIQEEQADAHSTLAKIRVKFSRSADAPAYQQGQNQLYNELNLGRREEYDVLDKRRGRDPEMGGKPRRKNPQEGLYNELQKDKMAEAYSEIGMKGERRRGKGHDGLYQGLSTATKDTYDALHMQALPPR

SEQ ID NO: 916 - protein, 498 aa, synthetic construct
MALPVTALLLPLALLLHAARPDYKDDDDKGGGGSGGGGSQVQLVQSGAEVKKPGASVKVSCKASGYTFIDYYIHWVRQAPGQGLEWMGWMNPNSGNTGYAQKFQGRVTMTRDTSTSTVYMELSSLRSEDTAVYYCARGLSGYDLDDYWGQGTLVTVSSGGGGSGGGGSGGGGSDIQMTQSPSSLSASVGDRVTITCQASQDISNYLNWYQQKPGKAPKLLIYDASSLESGVPSRFSGSGSGTDFTLTISSLQPEDFATYYCQQSYRSPLTFGGGTKVEIKTTTPAPRPPTPAPTIASQPLSLRPEACRPAAGGAVHTRGLDFACDIYIWAPLAGTCGVLLLSLVITLYCRRDQRLPPDAHKPPGGGSFRTPIQEEQADAHSTLAKIRVKFSRSADAPAYQQGQNQLYNELNLGRREEYDVLDKRRGRDPEMGGKPRRKNPQEGLYNELQKDKMAEAYSEIGMKGERRRGKGHDGLYQGLSTATKDTYDALHMQALPPR

SEQ ID NO: 917 - protein, 497 aa, synthetic construct
MALPVTALLLPLALLLHAARPDYKDDDDKGGGGSGGGGSQVQLVQSGAEVKKPGASVKVSCKASGYTFTSYYMHWVRQAPGQGLEWMGWINPNSGGTKYAHKFQGRVTMTRDTSTSTVYMELSSLRSEDTAVYYCARGLSGYDFDYWGQGTTVTVSSGGGGSGGGGSGGGGSDIQMTQSPSSLSASVGDRVTITCQASQDISNYLNWYQQKPGKAPKLLIYDASNLETGVPSRFSGSGSGTDFTLTISSLQPEDFATYYCQQAYRWPITFGQGTRLEIKTTTPAPRPPTPAPTIASQPLSLRPEACRPAAGGAVHTRGLDFACDIYIWAPLAGTCGVLLLSLVITLYCRRDQRLPPDAHKPPGGGSFRTPIQEEQADAHSTLAKIRVKFSRSADAPAYQQGQNQLYNELNLGRREEYDVLDKRRGRDPEMGGKPRRKNPQEGLYNELQKDKMAEAYSEIGMKGERRRGKGHDGLYQGLSTATKDTYDALHMQALPPR

SEQ ID NO: 918 - protein, 498 aa, synthetic construct
MALPVTALLLPLALLLHAARPDYKDDDDKGGGGSGGGGSQVQLVQSGAEVKKPGASVKVSCKASGYTFTGYYMHWVRQAPGQGLEWMGWMNPNSGNTGYAQKFQGRVTMTRDTSTSTVYMELSSLRSEDTAVYYCARGTDVYGDFDYWGQGTLVTVSSGGGGSGGGGSGGGGSDIQMTQSPSSLSASVGDRVTITCRASQSISSYLNWYQQKPGKAPKLLIYDASYLETGVPSRFSGSGSGTDFTLTISSLQPEDFATYYCQQSYTIPPTFGQGTKVEIKTTTPAPRPPTPAPTIASQPLSLRPEACRPAAGGAVHTRGLDFACDIYIWAPLAGTCGVLLLSLVITLYCRRDQRLPPDAHKPPGGGSFRTPIQEEQADAHSTLAKIRVKFSRSADAPAYQQGQNQLYNELNLGRREEYDVLDKRRGRDPEMGGKPRRKNPQEGLYNELQKDKMAEAYSEIGMKGERRRGKGHDGLYQGLSTATKDTYDALHMQALPPR

SEQ ID NO: 919 - protein, 505 aa, synthetic construct
MALPVTALLLPLALLLHAARPDYKDDDDKGGGGSGGGGSQVQLVQSGAEVKKPGSSVKVSCKASGYTFTENEMHWVRQAPGQGLEWMGGIIPIFGTANYAQKFQGRVTITADESTSTAYMELSSLRSEDTAVYYCAREGGTAMATGYYYYGMDVWGQGTTVTVSSGGGGSGGGGSGGGGSDIQMTQSPSSLSASVGDRVTITCQASQDISNYLNWYQQKPGKAPKLLIYDASNLETGVPSRFSGSGSGTDFTLTISSLQPEDFATYYCQQSYSTPLTFGQGTKVEIKTTTPAPRPPTPAPTIASQPLSLRPEACRPAAGGAVHTRGLDFACDIYIWAPLAGTCGVLLLSLVITLYCRRDQRLPPDAHKPPGGGSFRTPIQEEQADAHSTLAKIRVKFSRSADAPAYQQGQNQLYNELNLGRREEYDVLDKRRGRDPEMGGKPRRKNPQEGLYNELQKDKMAEAYSEIGMKGERRRGKGHDGLYQGLSTATKDTYDALHMQALPPR

SEQ ID NO: 920 - protein, 503 aa, synthetic construct
MALPVTALLLPLALLLHAARPDYKDDDDKGGGGSGGGGSQVQLVQSGAEVKKPGASVKVSCKASGYTFTENEMHWVRQAPGQGLEWMGWINSNGGYTGYALKFQGRVTMTRDTSTSTVYMELSSLRSEDTAVYYCARASNYGGHFDYWGQGTLVTVSSGGGGSGGGGSGGGGSDIVMTQSPLSLPVTPGEPASISCRSSQSLLHSNGYNYLDWYLQKPGQSPQLLIYQASSLESGVPDRFSGSGSGTDFTLKISRVEAEDVGVYYCMQGTHWPPTFGGGTKVEIKTTTPAPRPPTPAPTIASQPLSLRPEACRPAAGGAVHTRGLDFACDIYIWAPLAGTCGVLLLSLVITLYCRRDQRLPPDAHKPPGGGSFRTPIQEEQADAHSTLAKIRVKFSRSADAPAYQQGQNQLYNELNLGRREEYDVLDKRRGRDPEMGGKPRRKNPQEGLYNELQKDKMAEAYSEIGMKGERRRGKGHDGLYQGLSTATKDTYDALHMQALPPR

SEQ ID NO: 921 - protein, 498 aa, synthetic construct
MALPVTALLLPLALLLHAARPDYKDDDDKGGGGSGGGGSQVQLVQSGAEVKKPGASVKVSCKASGYTFTSYYMHWVRQAPGQGLEWMGIINPSGGSTIYAQKFQGRVTMTRDTSTSTVYMELSSLRSEDTAVYYCAKDMGAWAAGFDYWGQGTLVTVSSGGGGSGGGGSGGGGSDIQMTQSPSSLSASVGDRVTITCQASQDISNYLNWYQQKPGKAPKLLIYATSTLANGVPSRFSGSGSGTDFTLTISSLQPEDFATYYCQQSYSTLTFGQGTRLEIKTTTPAPRPPTPAPTIASQPLSLRPEACRPAAGGAVHTRGLDFACDIYIWAPLAGTCGVLLLSLVITLYCRRDQRLPPDAHKPPGGGSFRTPIQEEQADAHSTLAKIRVKFSRSADAPAYQQGQNQLYNELNLGRREEYDVLDKRRGRDPEMGGKPRRKNPQEGLYNELQKDKMAEAYSEIGMKGERRRGKGHDGLYQGLSTATKDTYDALHMQALPPR

SEQ ID NO: 922 - protein, 499 aa, synthetic construct
MALPVTALLLPLALLLHAARPDYKDDDDKGGGGSGGGGSQVQLVQSGAEVKKPGASVKVSCKASGYTFTGYYMHWVRQAPGQGLEWMGWINPNSGDTGYAQKFQGRVTMTRDTSTSTVYMELSSLRSEDTAVYYCARSVNDYGDYDGYWGQGTLVTVSSGGGGSGGGGSGGGGSDIQMTQSPSSLSASVGDRVTITCQASQDISNYLNWYQQKPGKAPKLLIYDASNLETGVPSRFSGSGSGTDFTLTISSLQPEDFATYYCQQSYSTPPTFGQGTKVEIKTTTPAPRPPTPAPTIASQPLSLRPEACRPAAGGAVHTRGLDFACDIYIWAPLAGTCGVLLLSLVITLYCRRDQRLPPDAHKPPGGGSFRTPIQEEQADAHSTLAKIRVKFSRSADAPAYQQGQNQLYNELNLGRREEYDVLDKRRGRDPEMGGKPRRKNPQEGLYNELQKDKMAEAYSEIGMKGERRRGKGHDGLYQGLSTATKDTYDALHMQALPPR

SEQ ID NO: 923 - protein, 499 aa, synthetic construct
MALPVTALLLPLALLLHAARPDYKDDDDKGGGGSGGGGSQVQLVQSGAEVKKPGASVKVSCKASGYTFTGYYMHWVRQAPGQGLEWMGIINPSGGSTSYAQKFQGRVTMTRDTSTSTVYMELSSLRSEDTAVYYCARDYGDYDASFDYWGQGTLVTVSSGGGGSGGGGSGGGGSDIQMTQSPSSLSASVGDRVTITCRASQSIDNWLAWYQQKPGKAPKLLIYAASTLQSGVPSRFSGSGSGTDFTLTISSLQPEDFATYYCQQSYDSPPTFGQGTKLEIKTTTPAPRPPTPAPTIASQPLSLRPEACRPAAGGAVHTRGLDFACDIYIWAPLAGTCGVLLLSLVITLYCRRDQRLPPDAHKPPGGGSFRTPIQEEQADAHSTLAKIRVKFSRSADAPAYQQGQNQLYNELNLGRREEYDVLDKRRGRDPEMGGKPRRKNPQEGLYNELQKDKMAEAYSEIGMKGERRRGKGHDGLYQGLSTATKDTYDALHMQALPPR

SEQ ID NO: 924 - protein, 496 aa, synthetic construct
MALPVTALLLPLALLLHAARPDYKDDDDKGGGGSGGGGSQVQLVQSGAEVKKPGASVKVSCKASGYTFTSYDINWVRQAPGQGLEWMGIINPSDGSTIYAQNFQGRVTMTRDTSTSTVYMELSSLRSEDTAVYYCVKEEAWYFDLWGRGTLVTVSSGGGGSGGGGSGGGGSDIQMTQSPSSLSASVGDRVTITCQASQDISNYLNWYQQKPGKAPKLLIYDASNLETGVPSRFSGSGSGTDFTLTISSLQPEDFATYYCQQSYSTPLTFGGGTKVEIKTTTPAPRPPTPAPTIASQPLSLRPEACRPAAGGAVHTRGLDFACDIYIWAPLAGTCGVLLLSLVITLYCRRDQRLPPDAHKPPGGGSFRTPIQEEQADAHSTLAKIRVKFSRSADAPAYQQGQNQLYNELNLGRREEYDVLDKRRGRDPEMGGKPRRKNPQEGLYNELQKDKMAEAYSEIGMKGERRRGKGHDGLYQGLSTATKDTYDALHMQALPPR

SEQ ID NO: 925 - protein, 496 aa, synthetic construct
MALPVTALLLPLALLLHAARPDYKDDDDKGGGGSGGGGSQVQLVQSGAEVKKPGASVKVSCKASGYTFTSYYMHWVRQAPGQGLEWMGWMNPDNGDTGYAQMFQGRVTMTRDTSTSTVYMELSSLRSEDTAVYYCASGDYYDILYWGQGTLVTVSSGGGGSGGGGSGGGGSDIQMTQSPSSLSASVGDRVTITCQASQDISNYLNWYQQKPGKAPKLLIYDVSNLETGVPSRFSGSGSGTDFTLTISSLQPEDFATYYCQQANSFPLTFGGGTKVEIKTTTPAPRPPTPAPTIASQPLSLRPEACRPAAGGAVHTRGLDFACDIYIWAPLAGTCGVLLLSLVITLYCRRDQRLPPDAHKPPGGGSFRTPIQEEQADAHSTLAKIRVKFSRSADAPAYQQGQNQLYNELNLGRREEYDVLDKRRGRDPEMGGKPRRKNPQEGLYNELQKDKMAEAYSEIGMKGERRRGKGHDGLYQGLSTATKDTYDALHMQALPPR

SEQ ID NO: 926 - protein, 497 aa, synthetic construct
MALPVTALLLPLALLLHAARPDYKDDDDKGGGGSGGGGSQVQLVQSGAEVKKPGASVKVSCKASGYTFTSYYMHWVRQAPGQGLEWMGWMNPNSGDTGYAQKFQGRVTMTRDTSTSTVYMELSSLRSEDTAVYYCARGPSGYEFDYWGQGTLVTVSSGGGGSGGGGSGGGGSDIQMTQSPSSLSASVGDRVTITCRASQTISNYLNWYQQKPGKAPKLLIYDASSLESGVPSRFSGSGSGTDFTLTISSLQPEDFATYYCQQAISFPLTFGGGTKVEIKTTTPAPRPPTPAPTIASQPLSLRPEACRPAAGGAVHTRGLDFACDIYIWAPLAGTCGVLLLSLVITLYCRRDQRLPPDAHKPPGGGSFRTPIQEEQADAHSTLAKIRVKFSRSADAPAYQQGQNQLYNELNLGRREEYDVLDKRRGRDPEMGGKPRRKNPQEGLYNELQKDKMAEAYSEIGMKGERRRGKGHDGLYQGLSTATKDTYDALHMQALPPR

SEQ ID NO: 927 - protein, 501 aa, synthetic construct
MALPVTALLLPLALLLHAARPDYKDDDDKGGGGSGGGGSQVQLVQSGAEVKKPGASVKVSCKASGYTFTDYYMHWVRQAPGQGLEWMGIINPNSGGTNYAQKFQGRVTMTRDTSTSTVYMELSSLRSEDTAVYYCARDFSVYAAADGMDVWGQGTLVTVSSGGGGSGGGGSGGGGSDIQMTQSPSSLSASVGDRVTITCRASQSISSYLNWYQQKPGKAPKLLIYDASNLATGVPSRFSGSGSGTDFTLTISSLQPEDFATYYCQQSDSSPLTFGQGTKVEIKTTTPAPRPPTPAPTIASQPLSLRPEACRPAAGGAVHTRGLDFACDIYIWAPLAGTCGVLLLSLVITLYCRRDQRLPPDAHKPPGGGSFRTPIQEEQADAHSTLAKIRVKFSRSADAPAYQQGQNQLYNELNLGRREEYDVLDKRRGRDPEMGGKPRRKNPQEGLYNELQKDKMAEAYSEIGMKGERRRGKGHDGLYQGLSTATKDTYDALHMQALPPR

SEQ ID NO: 928 - protein, 500 aa, synthetic construct
MALPVTALLLPLALLLHAARPDYKDDDDKGGGGSGGGGSQVQLVQSGAEVKKPGASVKVSCKASGYTFTGYYMHWVRQAPGQGLEWMGIINPGDGGTIYAQNFQGRVTMTRDTSTSTVYMELSSLRSEDTAVYYCARGFGESAPDAFDIWGQGTMVTVSSGGGGSGGGGSGGGGSDIQMTQSPSSLSASVGDRVTITCQASQDISNYLNWYQQKPGKAPKLLIYGATTLQSGVPSRFSGSGSGTDFTLTISSLQPEDFATYYCQQADSFPYTFGQGTKLEIKTTTPAPRPPTPAPTIASQPLSLRPEACRPAAGGAVHTRGLDFACDIYIWAPLAGTCGVLLLSLVITLYCRRDQRLPPDAHKPPGGGSFRTPIQEEQADAHSTLAKIRVKFSRSADAPAYQQGQNQLYNELNLGRREEYDVLDKRRGRDPEMGGKPRRKNPQEGLYNELQKDKMAEAYSEIGMKGERRRGKGHDGLYQGLSTATKDTYDALHMQALPPR

SEQ ID NO: 929 - protein, 497 aa, synthetic construct
MALPVTALLLPLALLLHAARPDYKDDDDKGGGGSGGGGSQVQLVQSGAEVKKPGASVKVSCKASGYTFTGYYMHWVRQAPGQGLEWMGIINPSGGSTSYAQKFQGRVTMTRDTSTSTVYMELSSLRSEDTAVYYCAAGTEIYYMDVWGKGTTVTVSSGGGGSGGGGSGGGGSDIQMTQSPSSLSASVGDRVTITCRASQTIDIYLNWYQQKPGKAPKLLIYDASNLETGVPSRFSGSGSGTDFTLTISSLQPEDFATYYCQQADSFPLTFGGGTKVEIKTTTPAPRPPTPAPTIASQPLSLRPEACRPAAGGAVHTRGLDFACDIYIWAPLAGTCGVLLLSLVITLYCRRDQRLPPDAHKPPGGGSFRTPIQEEQADAHSTLAKIRVKFSRSADAPAYQQGQNQLYNELNLGRREEYDVLDKRRGRDPEMGGKPRRKNPQEGLYNELQKDKMAEAYSEIGMKGERRRGKGHDGLYQGLSTATKDTYDALHMQALPPR

SEQ ID NO: 930 - protein, 506 aa, synthetic construct
MALPVTALLLPLALLLHAARPDYKDDDDKGGGGSGGGGSQVQLVQSGAEVKKPGASVKVSCKASGGTFSSYAISWVRQAPGQGLEWMGMINPSDGATTYAQKFQGRVTMTRDTSTSTVYMELSSLRSEDTAVYYCARERELLHFATNYYYYGMDVWGQGTTVTVSSGGGGSGGGGSGGGGSDIQMTQSPSSLSASVGDRVTITCRASQGISNNLNWYQQKPGKAPKLLIYAASSLHSGVPSRFSGSGSGTDFTLTISSLQPEDFATYYCQQADAFPLTFGGGTKVEIKTTTPAPRPPTPAPTIASQPLSLRPEACRPAAGGAVHTRGLDFACDIYIWAPLAGTCGVLLLSLVITLYCRRDQRLPPDAHKPPGGGSFRTPIQEEQADAHSTLAKIRVKFSRSADAPAYQQGQNQLYNELNLGRREEYDVLDKRRGRDPEMGGKPRRKNPQEGLYNELQKDKMAEAYSEIGMKGERRRGKGHDGLYQGLSTATKDTYDALHMQALPPR

SEQ ID NO: 931 - protein, 502 aa, synthetic construct
MALPVTALLLPLALLLHAARPDYKDDDDKGGGGSGGGGSQVQLVQSGAEVKKPGASVKVSCKASGYTFTRNYMHWVRQAPGQGLEWMGWISPDNGVTNYAQNFQGRVTMTRDTSTSTVYMELSSLRSEDTAVYYCAKTQGSSSWYQWYFDLWGRGTLVTVSSGGGGSGGGGSGGGGSDIQMTQSPSSLSASVGDRVTITCRASQSIGTWLAWYQQKPGKAPKLLIYAASSLQSGVPSRFSGSGSGTDFTLTISSLQPEDFATYYCQQSYTTPITFGQGTKVEIKTTTPAPRPPTPAPTIASQPLSLRPEACRPAAGGAVHTRGLDFACDIYIWAPLAGTCGVLLLSLVITLYCRRDQRLPPDAHKPPGGGSFRTPIQEEQADAHSTLAKIRVKFSRSADAPAYQQGQNQLYNELNLGRREEYDVLDKRRGRDPEMGGKPRRKNPQEGLYNELQKDKMAEAYSEIGMKGERRRGKGHDGLYQGLSTATKDTYDALHMQALPPR

SEQ ID NO: 932 - protein, 498 aa, synthetic construct
MALPVTALLLPLALLLHAARPDYKDDDDKGGGGSGGGGSQVQLVQSGAEVKKPGASVKVSCKASGYTFTSYYMHWVRQAPGQGLEWMGIIDPGSGDTSYAQKFQGRVTMTRDTSTSTVYMELSSLRSEDTAVYYCARGSNWYDYFDYWGQGTLVTVSSGGGGSGGGGSGGGGSEIVMTQSPATLSVSPGERATLSCRASQSVSSYLAWYQQKPGQAPRLLIYGASTRATGIPARFSGSGSGTEFTLTISSLQSEDFAVYYCQQYDSYPPTFGGGTKVEIKTTTPAPRPPTPAPTIASQPLSLRPEACRPAAGGAVHTRGLDFACDIYIWAPLAGTCGVLLLSLVITLYCRRDQRLPPDAHKPPGGGSFRTPIQEEQADAHSTLAKIRVKFSRSADAPAYQQGQNQLYNELNLGRREEYDVLDKRRGRDPEMGGKPRRKNPQEGLYNELQKDKMAEAYSEIGMKGERRRGKGHDGLYQGLSTATKDTYDALHMQALPPR

SEQ ID NO: 933 - protein, 498 aa, synthetic construct
MALPVTALLLPLALLLHAARPDYKDDDDKGGGGSGGGGSQVQLVQSGAEVKKPGASVKVSCKASGYRLSDHYMHWVRQAPGQGLEWMGIINPSGGSTTYAQNFQGRVTMTRDTSTSTVYMELSSLRSEDTAVYYCASSYYGDYVLVNWGQGTLVTVSSGGGGSGGGGSGGGGSDIQMTQSPSSLSASVGDRVTITCQASQDISNYLNWYQQKPGKAPKLLIYAASTLESGVPSRFSGSGSGTDFTLTISSLQPEDFATYYCLQDYDYPLTFGQGTKLEIKTTTPAPRPPTPAPTIASQPLSLRPEACRPAAGGAVHTRGLDFACDIYIWAPLAGTCGVLLLSLVITLYCRRDQRLPPDAHKPPGGGSFRTPIQEEQADAHSTLAKIRVKFSRSADAPAYQQGQNQLYNELNLGRREEYDVLDKRRGRDPEMGGKPRRKNPQEGLYNELQKDKMAEAYSEIGMKGERRRGKGHDGLYQGLSTATKDTYDALHMQALPPR

SEQ ID NO: 934 - protein, 499 aa, synthetic construct
MALPVTALLLPLALLLHAARPDYKDDDDKGGGGSGGGGSQVQLVQSGAEVKKPGASVKVSCKASGYTFTDYYVHWVRQAPGQGLEWMGWINPNTGGTSFAQNFQGRVTMTRDTSTSTVYMELSSLRSEDTAVYYCARDLGQWLGEIDYWGQGTLVTVSSGGGGSGGGGSGGGGSDIQMTQSPSSLSASVGDRVTITCRASQTIYKWLAWYQQKPGKAPKLLIYDASSLESGVPSRFSGSGSGTDFTLTISSLQPEDFATYYCQQANSFPFTFGPGTKVDIKTTTPAPRPPTPAPTIASQPLSLRPEACRPAAGGAVHTRGLDFACDIYIWAPLAGTCGVLLLSLVITLYCRRDQRLPPDAHKPPGGGSFRTPIQEEQADAHSTLAKIRVKFSRSADAPAYQQGQNQLYNELNLGRREEYDVLDKRRGRDPEMGGKPRRKNPQEGLYNELQKDKMAEAYSEIGMKGERRRGKGHDGLYQGLSTATKDTYDALHMQALPPR

SEQ ID NO: 935 - protein, 503 aa, synthetic construct
MALPVTALLLPLALLLHAARPDYKDDDDKGGGGSGGGGSQVQLVQSGAEVKKPGASVKVSCKASGYTFTDYTDYFVHWVRQAPGQGLEWMGIFNPSDGSTSYAQEFQGRVTMTRDTSTSTVYMELSSLRSEDTAVYYCARGPYSSSWYYFDYWGQGTLVTVSSGGGGSGGGGSGGGGSDIQMTQSPSSLSASVGDRVTITCQASQDISNYLNWYQQKPGKAPKLLIYDASNLETGVPSRFSGSGSGTDFTLTISSLQPEDFATYYCQQAHSFPPTFGQGTKVEIKTTTPAPRPPTPAPTIASQPLSLRPEACRPAAGGAVHTRGLDFACDIYIWAPLAGTCGVLLLSLVITLYCRRDQRLPPDAHKPPGGGSFRTPIQEEQADAHSTLAKIRVKFSRSADAPAYQQGQNQLYNELNLGRREEYDVLDKRRGRDPEMGGKPRRKNPQEGLYNELQKDKMAEAYSEIGMKGERRRGKGHDGLYQGLSTATKDTYDALHMQALPPR

SEQ ID NO: 936 - protein, 499 aa, synthetic construct
MALPVTALLLPLALLLHAARPDYKDDDDKGGGGSGGGGSQVQLVQSGAEVKKPGASVKVSCKASGYIFTDYYMHWVRQAPGQGLEWMGIINPSGGDTLYAQKFQGRVTMTRDTSTSTVYMELSSLRSEDTAVYYCAREGVGAMGVFDYWGQGTLVTVSSGGGGSGGGGSGGGGSDIQMTQSPSSLSASVGDRVTITCRASTSISDYVHWYQQKPGKAPKLLIYDASSLQSGVPSRFSGSGSGTDFTLTISSLQPEDFATYYCQQSDSTPPTFGGGTKVEIKTTTPAPRPPTPAPTIASQPLSLRPEACRPAAGGAVHTRGLDFACDIYIWAPLAGTCGVLLLSLVITLYCRRDQRLPPDAHKPPGGGSFRTPIQEEQADAHSTLAKIRVKFSRSADAPAYQQGQNQLYNELNLGRREEYDVLDKRRGRDPEMGGKPRRKNPQEGLYNELQKDKMAEAYSEIGMKGERRRGKGHDGLYQGLSTATKDTYDALHMQALPPR

SEQ ID NO: 937 - protein, 501 aa, synthetic construct
MALPVTALLLPLALLLHAARPDYKDDDDKGGGGSGGGGSQVQLVQSGAEVKKPGASVKVSCKASGYTFTDHYIHWVRQAPGQGLEWMGWISAYNGKTNYAQKFQGRVTMTRDTSTSTVYMELSSLRSEDTAVYYCARDTIYYDFWSGYDYWGQGTLVTVSSGGGGSGGGGSGGGGSDIQMTQSPSSLSASVGDRVTITCRASQGISNNLNWYQQKPGKAPKLLIYYASTLQSGVPSRFSGSGSGTDFTLTISSLQPEDFATYYCQQSYSTPITFGQGTRLEIKTTTPAPRPPTPAPTIASQPLSLRPEACRPAAGGAVHTRGLDFACDIYIWAPLAGTCGVLLLSLVITLYCRRDQRLPPDAHKPPGGGSFRTPIQEEQADAHSTLAKIRVKFSRSADAPAYQQGQNQLYNELNLGRREEYDVLDKRRGRDPEMGGKPRRKNPQEGLYNELQKDKMAEAYSEIGMKGERRRGKGHDGLYQGLSTATKDTYDALHMQALPPR

SEQ ID NO: 938 - protein, 501 aa, synthetic construct
MALPVTALLLPLALLLHAARPDYKDDDDKGGGGSGGGGSQVQLVQSGAEVKKPGASVKVSCKASGYTFTSYYMHWVRQAPGQGLEWMGIINPSGGATIYAQKFQGRVTMTRDTSTSTVYMELSSLRSEDTAVYYCARSRGDYYGSGDFDYWGQGTLVTVSSGGGGSGGGGSGGGGSDIQMTQSPSSLSASVGDRVTITCRASQTISNYLNWYQQKPGKAPKLLIYDASTLEAGVPSRFSGSGSGTDFTLTISSLQPEDFATYYCQQSYNPPYTFGQGTKLEIKTTTPAPRPPTPAPTIASQPLSLRPEACRPAAGGAVHTRGLDFACDIYIWAPLAGTCGVLLLSLVITLYCRRDQRLPPDAHKPPGGGSFRTPIQEEQADAHSTLAKIRVKFSRSADAPAYQQGQNQLYNELNLGRREEYDVLDKRRGRDPEMGGKPRRKNPQEGLYNELQKDKMAEAYSEIGMKGERRRGKGHDGLYQGLSTATKDTYDALHMQALPPR

SEQ ID NO: 939 - protein, 497 aa, synthetic construct
MALPVTALLLPLALLLHAARPDYKDDDDKGGGGSGGGGSQVQLVQSGAEVKKPGASVKVSCKASGYTFTDYYMHWVRQAPGQGLEWMGIINPSGGSTSYAQKFQGRVTMTRDTSTSTVYMELSSLRSEDTAVYYCARGYFDHAFDIWGQGTMVTVSSGGGGSGGGGSGGGGSDIQMTQSPSSLSASVGDRVTITCRASQSISTYLNWYQQKPGKAPKLLIYDASNLEIGVPSRFSGSGSGTDFTLTISSLQPEDFATYYCQQSDSSPLTFGQGTKVEIKTTTPAPRPPTPAPTIASQPLSLRPEACRPAAGGAVHTRGLDFACDIYIWAPLAGTCGVLLLSLVITLYCRRDQRLPPDAHKPPGGGSFRTPIQEEQADAHSTLAKIRVKFSRSADAPAYQQGQNQLYNELNLGRREEYDVLDKRRGRDPEMGGKPRRKNPQEGLYNELQKDKMAEAYSEIGMKGERRRGKGHDGLYQGLSTATKDTYDALHMQALPPR

SEQ ID NO: 940 - protein, 503 aa, synthetic construct
MALPVTALLLPLALLLHAARPDYKDDDDKGGGGSGGGGSQVQLVQSGAEVKKPGASVKVSCKASGYTFTGYYMHWVRQAPGQGLEWMGIINPSGGDTIYAQKFQGRVTMTRDTSTSTVYMELSSLRSEDTAVYYCARGDSSSWYDYYYYMDVWGKGTTVTVSSGGGGSGGGGSGGGGSDIQMTQSPSSLSASVGDRVTITCQASQDISNYLNWYQQKPGKAPKLLIYAASSLQSGVPSRFSGSGSGTDFTLTISSLQPEDFATYYCQQSYRTPLTFGGGTKVEIKTTTPAPRPPTPAPTIASQPLSLRPEACRPAAGGAVHTRGLDFACDIYIWAPLAGTCGVLLLSLVITLYCRRDQRLPPDAHKPPGGGSFRTPIQEEQADAHSTLAKIRVKFSRSADAPAYQQGQNQLYNELNLGRREEYDVLDKRRGRDPEMGGKPRRKNPQEGLYNELQKDKMAEAYSEIGMKGERRRGKGHDGLYQGLSTATKDTYDALHMQALPPR

SEQ ID NO: 941 - protein, 498 aa, synthetic construct
MALPVTALLLPLALLLHAARPDYKDDDDKGGGGSGGGGSQVQLVQSGAEVKKPGASVKVSCKASGYTFTDYFTHWVRQAPGQGLEWMGWINTYDGNTNYAQKFQGRVTMTRDTSTSTVYMELSSLRSEDTAVYYCAREMEWLGQVDYWGQGTLVTVSSGGGGSGGGGSGGGGSDIQMTQSPSSLSASVGDRVTITCRASQDIRNDLGWYQQKPGKAPKLLIYAASNLETGVPSRFSGSGSGTDFTLTISSLQPEDFATYYCQQSYSAPFTFGPGTKVDIKTTTPAPRPPTPAPTIASQPLSLRPEACRPAAGGAVHTRGLDFACDIYIWAPLAGTCGVLLLSLVITLYCRRDQRLPPDAHKPPGGGSFRTPIQEEQADAHSTLAKIRVKFSRSADAPAYQQGQNQLYNELNLGRREEYDVLDKRRGRDPEMGGKPRRKNPQEGLYNELQKDKMAEAYSEIGMKGERRRGKGHDGLYQGLSTATKDTYDALHMQALPPR

SEQ ID NO: 942 - protein, 498 aa, synthetic construct
MALPVTALLLPLALLLHAARPDYKDDDDKGGGGSGGGGSQVQLVQSGAEVKKPGASVKVSCKASGYTFTSYYIHWVRQAPGQGLEWMGRINPNGGGTNYAQKFQGRVTMTRDTSTSTVYMELSSLRSEDTAVYYCARGHRGGGGIDYWGQGTLVTVSSGGGGSGGGGSGGGGSDIQMTQSPSSLSASVGDRVTITCRASQEISNYLAWYQQKPGKAPKLLIYDASNLQTGVPSRFSGSGSGTDFTLTISSLQPEDFATYYCQQSYSTPFTFGPGTKVDIKTTTPAPRPPTPAPTIASQPLSLRPEACRPAAGGAVHTRGLDFACDIYIWAPLAGTCGVLLLSLVITLYCRRDQRLPPDAHKPPGGGSFRTPIQEEQADAHSTLAKIRVKFSRSADAPAYQQGQNQLYNELNLGRREEYDVLDKRRGRDPEMGGKPRRKNPQEGLYNELQKDKMAEAYSEIGMKGERRRGKGHDGLYQGLSTATKDTYDALHMQALPPR

SEQ ID NO: 943 - protein, 498 aa, synthetic construct
MALPVTALLLPLALLLHAARPDYKDDDDKGGGGSGGGGSQVQLVQSGAEVKKPGASVKVSCKASGGTFSSYAISWVRQAPGQGLEWMGWISPNSGDTHYAQKFQGRVTMTRDTSTSTVYMELSSLRSEDTAVYYCARDWGSGWYVDYWGQGTLVTVSSGGGGSGGGGSGGGGSDIQMTQSPSSLSASVGDRVTITCQASQDISDSLNWYQQKPGKAPKLLIYSASSLQSGVPSRFSGSGSGTDFTLTISSLQPEDFATYYCQQSFTTPYTFGQGTKVEIKTTTPAPRPPTPAPTIASQPLSLRPEACRPAAGGAVHTRGLDFACDIYIWAPLAGTCGVLLLSLVITLYCRRDQRLPPDAHKPPGGGSFRTPIQEEQADAHSTLAKIRVKFSRSADAPAYQQGQNQLYNELNLGRREEYDVLDKRRGRDPEMGGKPRRKNPQEGLYNELQKDKMAEAYSEIGMKGERRRGKGHDGLYQGLSTATKDTYDALHMQALPPR

SEQ ID NO: 944 - protein, 498 aa, synthetic construct
MALPVTALLLPLALLLHAARPDYKDDDDKGGGGSGGGGSQVQLVQSGAEVKKPGSSVKVSCKASGGTFNSYGISWVRQAPGQGLEWMGGIIPIFGTANYAQKFQGRVTITADESTSTAYMELSSLRSEDTAVYYCARDTYGDDAFDIWGQGTMVTVSSGGGGSGGGGSGGGGSDIQMTQSPSSLSASVGDRVTITCRASQSISSWLAWYQQKPGKAPKLLIYDASNLETGVPSRFSGSGSGTDFTLTISSLQPEDFATYYCQQNFSPPLTFGQGTRLEIKTTTPAPRPPTPAPTIASQPLSLRPEACRPAAGGAVHTRGLDFACDIYIWAPLAGTCGVLLLSLVITLYCRRDQRLPPDAHKPPGGGSFRTPIQEEQADAHSTLAKIRVKFSRSADAPAYQQGQNQLYNELNLGRREEYDVLDKRRGRDPEMGGKPRRKNPQEGLYNELQKDKMAEAYSEIGMKGERRRGKGHDGLYQGLSTATKDTYDALHMQALPPR

SEQ ID NO: 945 - protein, 503 aa, synthetic construct
MALPVTALLLPLALLLHAARPDYKDDDDKGGGGSGGGGSQVQLVQSGAEVKKPGASVKVSCKASGYSFTSYYMHWVRQAPGQGLEWMGIINPSGGTTSYAQKFQGRVTMTRDTSTSTVYMELSSLRSEDTAVYYCARDNSPYSSSWWDYFDYWGQGTLVTVSSGGGGSGGGGSGGGGSDIQMTQSPSSLSASVGDRVTITCRASQDIRHYLAWYQQKPGKAPKLLIYDASSLQSGVPSRFSGSGSGTDFTLTISSLQPEDFATYYCQQTYDAPITFGQGTRLEIKTTTPAPRPPTPAPTIASQPLSLRPEACRPAAGGAVHTRGLDFACDIYIWAPLAGTCGVLLLSLVITLYCRRDQRLPPDAHKPPGGGSFRTPIQEEQADAHSTLAKIRVKFSRSADAPAYQQGQNQLYNELNLGRREEYDVLDKRRGRDPEMGGKPRRKNPQEGLYNELQKDKMAEAYSEIGMKGERRRGKGHDGLYQGLSTATKDTYDALHMQALPPR

SEQ ID NO: 946 - protein, 501 aa, synthetic construct
MALPVTALLLPLALLLHAARPDYKDDDDKGGGGSGGGGSQVQLVQSGAEVKKPGASVKVSCKASGYTFTDYYIHWVRQAPGQGLEWMGWITPNSGYTYYAQNFQGRVTMTRDTSTSTVYMELSSLRSEDTAVYYCARNTDCYGDFLGLDVWGQGTTVTVSSGGGGSGGGGSGGGGSDIVMTQSPDSLAVSLGERATINCRASSSISNYLAWYQQKPGQPPKLLIYGASTRASGVPDRFSGSGSGTDFTLTISSLQAEDVAVYYCQQSYSTPLTFGQGTKVEIKTTTPAPRPPTPAPTIASQPLSLRPEACRPAAGGAVHTRGLDFACDIYIWAPLAGTCGVLLLSLVITLYCRRDQRLPPDAHKPPGGGSFRTPIQEEQADAHSTLAKIRVKFSRSADAPAYQQGQNQLYNELNLGRREEYDVLDKRRGRDPEMGGKPRRKNPQEGLYNELQKDKMAEAYSEIGMKGERRRGKGHDGLYQGLSTATKDTYDALHMQALPPR

SEQ ID NO: 947 - protein, 501 aa, synthetic construct
MALPVTALLLPLALLLHAARPDYKDDDDKGGGGSGGGGSQVQLVQSGAEVKKPGASVKVSCKASGYTFNGYLMHWVRQAPGQGLEWMGIVNPSDGSTGYAQKFQGRVTMTRDTSTSTVYMELSSLRSEDTAVYYCAKDTGLRYFDWLLDYWGQGTLVTVSSGGGGSGGGGSGGGGSDIQMTQSPSSLSASVGDRVTITCRASQGITNFLAWYQQKPGKAPKLLIYDASNLETGVPSRFSGSGSGTDFTLTISSLQPEDFATYYCQQSYGAPLTFGQGTRLEIKTTTPAPRPPTPAPTIASQPLSLRPEACRPAAGGAVHTRGLDFACDIYIWAPLAGTCGVLLLSLVITLYCRRDQRLPPDAHKPPGGGSFRTPIQEEQADAHSTLAKIRVKFSRSADAPAYQQGQNQLYNELNLGRREEYDVLDKRRGRDPEMGGKPRRKNPQEGLYNELQKDKMAEAYSEIGMKGERRRGKGHDGLYQGLSTATKDTYDALHMQALPPR

SEQ ID NO: 948 - protein, 497 aa, synthetic construct
MALPVTALLLPLALLLHAARPDYKDDDDKGGGGSGGGGSQVQLVQSGAEVKKPGASVKVSCKASGYTFTSYYMHWVRQAPGQGLEWMGIIDPSGGRTIYAQRFQGRVTMTRDTSTSTVYMELSSLRSEDTAVYYCARHEAGGIFDYWGQGTLVTVSSGGGGSGGGGSGGGGSDIQMTQSPSSLSASVGDRVTITCQASQDISNYLNWYQQKPGKAPKLLIYSASTLQSGVPSRFSGSGSGTDFTLTISSLQPEDFATYYCQQSYSSPYRFGQGTKVEIKTTTPAPRPPTPAPTIASQPLSLRPEACRPAAGGAVHTRGLDFACDIYIWAPLAGTCGVLLLSLVITLYCRRDQRLPPDAHKPPGGGSFRTPIQEEQADAHSTLAKIRVKFSRSADAPAYQQGQNQLYNELNLGRREEYDVLDKRRGRDPEMGGKPRRKNPQEGLYNELQKDKMAEAYSEIGMKGERRRGKGHDGLYQGLSTATKDTYDALHMQALPPR

SEQ ID NO: 949 - protein, 505 aa, synthetic construct
MALPVTALLLPLALLLHAARPDYKDDDDKGGGGSGGGGSQVQLVQSGAEVKKPGSSVKVSCKASGYTFSDSYMHWVRQAPGQGLEWVGGIIPMAGIPAYAEEFQGRVTITADESTSTAYMELSSLRSEDTAVYYCARADDYGGNWYFDLWGRGTLVTVSSGGGGSGGGGSGGGGSDIVMTQSPLSLPVTPGEPASISCRSSQSLLHSNGYNYLDWYLQKPGQSPQLLIYAASSLQSGVPDRFSGSGSGTDFTLKISRVEAEDVGVYYCMQGAHWPPTFGQGTKLEIKTTTPAPRPPTPAPTIASQPLSLRPEACRPAAGGAVHTRGLDFACDIYIWAPLAGTCGVLLLSLVITLYCRRDQRLPPDAHKPPGGGSFRTPIQEEQADAHSTLAKIRVKFSRSADAPAYQQGQNQLYNELNLGRREEYDVLDKRRGRDPEMGGKPRRKNPQEGLYNELQKDKMAEAYSEIGMKGERRRGKGHDGLYQGLSTATKDTYDALHMQALPPR

SEQ ID NO: 950 - protein, 499 aa, synthetic construct
MALPVTALLLPLALLLHAARPDYKDDDDKGGGGSGGGGSQVQLVQSGAEVKKPGASVKVSCKASGYIFTDYYMHWVRQAPGQGLEWMGIINPSGGSTSYAQKFQGRVTMTRDTSTSTVYMELSSLRSEDTAVYYCARDSGWYESWFDPWGQGTLVTVSSGGGGSGGGGSGGGGSDIQMTQSPSSLSASVGDRVTITCRASQDIRDGLGWYQQKPGKAPKLLIYAASTLQSGVPSRFSGSGSGTDFTLTISSLQPEDFATYYCQQSYGTPPTFGQGTKVEIKTTTPAPRPPTPAPTIASQPLSLRPEACRPAAGGAVHTRGLDFACDIYIWAPLAGTCGVLLLSLVITLYCRRDQRLPPDAHKPPGGGSFRTPIQEEQADAHSTLAKIRVKFSRSADAPAYQQGQNQLYNELNLGRREEYDVLDKRRGRDPEMGGKPRRKNPQEGLYNELQKDKMAEAYSEIGMKGERRRGKGHDGLYQGLSTATKDTYDALHMQALPPR

SEQ ID NO: 951 - protein, 500 aa, synthetic construct
MALPVTALLLPLALLLHAARPDYKDDDDKGGGGSGGGGSQVQLVQSGAEVKKPGASVKVSCKASGYTFTDYYLHWVRQAPGQGLEWMGWISAYNGNTNYAQKFQGRVTMTRDTSTSTVYMELSSLRSEDTAVYYCAREIVGATEDWYFDLWGRGTLVTVSSGGGGSGGGGSGGGGSEIVMTQSPATLSVSPGERATLSCRASQSVSSYLAWYQQKPGQAPRLLIYGASTRATGIPARFSGSGSGTEFTLTISSLQSEDFAVYYCQQYDSSPTFGQGTKVEIKTTTPAPRPPTPAPTIASQPLSLRPEACRPAAGGAVHTRGLDFACDIYIWAPLAGTCGVLLLSLVITLYCRRDQRLPPDAHKPPGGGSFRTPIQEEQADAHSTLAKIRVKFSRSADAPAYQQGQNQLYNELNLGRREEYDVLDKRRGRDPEMGGKPRRKNPQEGLYNELQKDKMAEAYSEIGMKGERRRGKGHDGLYQGLSTATKDTYDALHMQALPPR

SEQ ID NO: 952 - protein, 498 aa, synthetic construct
MALPVTALLLPLALLLHAARPDYKDDDDKGGGGSGGGGSQVQLVQSGAEVKKPGASVKVSCKASGYTFTAYYLHWVRQAPGQGLEWMGMINPNNGGTIYAQTFQGRVTMTRDTSTSTVYMELSSLRSEDTAVYYCARDLGGYVLFDYWGQGTLVTVSSGGGGSGGGGSGGGGSDIQMTQSPSSLSASVGDRVTITCRASQSISSYLNWYQQKPGKAPKLLIYDASNLETGVPSRFSGSGSGTDFTLTISSLQPEDFATYYCQQSHSAPITFGQGTRLEIKTTTPAPRPPTPAPTIASQPLSLRPEACRPAAGGAVHTRGLDFACDIYIWAPLAGTCGVLLLSLVITLYCRRDQRLPPDAHKPPGGGSFRTPIQEEQADAHSTLAKIRVKFSRSADAPAYQQGQNQLYNELNLGRREEYDVLDKRRGRDPEMGGKPRRKNPQEGLYNELQKDKMAEAYSEIGMKGERRRGKGHDGLYQGLSTATKDTYDALHMQALPPR

SEQ ID NO: 953 - protein, 498 aa, synthetic construct
MALPVTALLLPLALLLHAARPDYKDDDDKGGGGSGGGGSQVQLVQSGAEVKKPGASVKVSCKASGYTFTDYYIHWVRQAPGQGLEWMGMINPRGGSTTYAQSFQGRVTMTRDTSTSTVYMELSSLRSEDTAVYYCARDLGDYGDYDYWGQGTLVTVSSGGGGSGGGGSGGGGSDIQMTQSPSSLSASVGDRVTITCRASQSISTNLAWYQQKPGKAPKLLIYDASYLEAGVPSRFSGSGSGTDFTLTISSLQPEDFATYYCQQSYSTPPTFGQGTKLEIKTTTPAPRPPTPAPTIASQPLSLRPEACRPAAGGAVHTRGLDFACDIYIWAPLAGTCGVLLLSLVITLYCRRDQRLPPDAHKPPGGGSFRTPIQEEQADAHSTLAKIRVKFSRSADAPAYQQGQNQLYNELNLGRREEYDVLDKRRGRDPEMGGKPRRKNPQEGLYNELQKDKMAEAYSEIGMKGERRRGKGHDGLYQGLSTATKDTYDALHMQALPPR

SEQ ID NO: 954 - protein, 509 aa, synthetic construct
MALPVTALLLPLALLLHAARPDYKDDDDKGGGGSGGGGSEVQLLESGGGLVQPGGSLRLSCAASGFTFSNSDMNWVRQAPGKGLEWVSAISGGGDTLYYADSVKGRFTISRDNSKNTLYLQMNSLRAEDTAVYYCAMASALDSSGDNEAFDIWGQGTTVTVSSGGGGSGGGGSGGGGSDIVMTQSPDSLAVSLGERATINCKSSQSVLYSSNNKNYLAWYQQKPGQPPKLLIYWASTRDSGVPDRFSGSGSGTDFTLTISSLQAEDVAVYYCQQYYGFPPTFGQGTRLEIKTTTPAPRPPTPAPTIASQPLSLRPEACRPAAGGAVHTRGLDFACDIYIWAPLAGTCGVLLLSLVITLYCRRDQRLPPDAHKPPGGGSFRTPIQEEQADAHSTLAKIRVKFSRSADAPAYQQGQNQLYNELNLGRREEYDVLDKRRGRDPEMGGKPRRKNPQEGLYNELQKDKMAEAYSEIGMKGERRRGKGHDGLYQGLSTATKDTYDALHMQALPPR

SEQ ID NO: 955 - protein, 501 aa, synthetic construct
MALPVTALLLPLALLLHAARPDYKDDDDKGGGGSGGGGSQVQLVQSGAEVKKPGASVKVSCKASGYTFTSYYMHWVRQAPGQGLEWMGWINPNNGGTSYAQKFQGRVTMTRDTSTSTVYMELSSLRSEDTAVYYCARVEDDFWSGPSFDYWGQGTLVTVSSGGGGSGGGGSGGGGSDIQMTQSPSSLSASVGDRVTITCQASHDISKFLNWYQQKPGKAPKLLIYDASNLQRGVPSRFSGSGSGTDFTLTISSLQPEDFATYYCQQTYSFPFTFGQGTKLEIKTTTPAPRPPTPAPTIASQPLSLRPEACRPAAGGAVHTRGLDFACDIYIWAPLAGTCGVLLLSLVITLYCRRDQRLPPDAHKPPGGGSFRTPIQEEQADAHSTLAKIRVKFSRSADAPAYQQGQNQLYNELNLGRREEYDVLDKRRGRDPEMGGKPRRKNPQEGLYNELQKDKMAEAYSEIGMKGERRRGKGHDGLYQGLSTATKDTYDALHMQALPPR

SEQ ID NO: 956 - protein, 503 aa, synthetic construct
MALPVTALLLPLALLLHAARPDYKDDDDKGGGGSGGGGSQVQLVQSGAEVKKPGSSVKVSCKASGGTFTNYAFSWVRQAPGQGLEWMGGIIPISGAANYAQKFQGRVTITADESTSTAYMELSSLRSEDTAVYYCARGSGLDDAFDIWGQGTMVTVSSGGGGSGGGGSGGGGSDIVMTQSPLSLPVTPGEPASISCRSSQSLLHSNGYNYLDWYLQKPGQSPQLLIYDASSLQSGVPDRFSGSGSGTDFTLKISRVEAEDVGVYYCMQARQTPLTFGQGTRLEIKTTTPAPRPPTPAPTIASQPLSLRPEACRPAAGGAVHTRGLDFACDIYIWAPLAGTCGVLLLSLVITLYCRRDQRLPPDAHKPPGGGSFRTPIQEEQADAHSTLAKIRVKFSRSADAPAYQQGQNQLYNELNLGRREEYDVLDKRRGRDPEMGGKPRRKNPQEGLYNELQKDKMAEAYSEIGMKGERRRGKGHDGLYQGLSTATKDTYDALHMQALPPR

SEQ ID NO: 957 - protein, 513 aa, synthetic construct
MALPVTALLLPLALLLHAARPDYKDDDDKGGGGSGGGGSQVQLVQSGAEVKKPGASVKVSCKASGYTFTAYYMHWVRQAPGQGLEWMGWMNPNSGNTGYAQKFQGRVTMTRDTSTSTVYMELSSLRSEDTAVYYCAREGRIDYGDYDDYYYYYGMDVWGQGTTVTVSSGGGGSGGGGSGGGGSDIVMTQSPLSLPVTPGEPASISCRSSQSLLHSNGYNYLDWYLQKPGQSPQLLIYAASNLQGGVPDRFSGSGSGTDFTLKISRVEAEDVGVYYCMQTLESPVTFGGGTKVEIKTTTPAPRPPTPAPTIASQPLSLRPEACRPAAGGAVHTRGLDFACDIYIWAPLAGTCGVLLLSLVITLYCRRDQRLPPDAHKPPGGGSFRTPIQEEQADAHSTLAKIRVKFSRSADAPAYQQGQNQLYNELNLGRREEYDVLDKRRGRDPEMGGKPRRKNPQEGLYNELQKDKMAEAYSEIGMKGERRRGKGHDGLYQGLSTATKDTYDALHMQALPPR

SEQ ID NO: 958 - protein, 499 aa, synthetic construct
MALPVTALLLPLALLLHAARPDYKDDDDKGGGGSGGGGSQVQLVQSGAEVKKPGASVKVSCKASGYTFTDYYVHWVRQAPGQGLEWMGTINPSGGSTSYAQKFQGRVTMTRDTSTSTVYMELSSLRSEDTAVYYCARDQGLWFTGFDYWGQGTLVTVSSGGGGSGGGGSGGGGSDIQMTQSPSSLSASVGDRVTITCRASQGISNNLNWYQQKPGKAPKLLIYDASNLERGVPSRFSGSGSGTDFTLTISSLQPEDFATYYCQQSYDGPITFGQGTRLEIKTTTPAPRPPTPAPTIASQPLSLRPEACRPAAGGAVHTRGLDFACDIYIWAPLAGTCGVLLLSLVITLYCRRDQRLPPDAHKPPGGGSFRTPIQEEQADAHSTLAKIRVKFSRSADAPAYQQGQNQLYNELNLGRREEYDVLDKRRGRDPEMGGKPRRKNPQEGLYNELQKDKMAEAYSEIGMKGERRRGKGHDGLYQGLSTATKDTYDALHMQALPPR

SEQ ID NO: 959 - protein, 499 aa, synthetic construct
MALPVTALLLPLALLLHAARPDYKDDDDKGGGGSGGGGSQVQLVQSGAEVKKPGASVKVSCKASGYTFTAYHMHWVRQAPGQGLEWMGIINPGDGATGYAQNLQGRVTMTRDTSTSTVYMELSSLRSEDTAVYYCAGEGISGSDAFDIWGQGTLVTVSSGGGGSGGGGSGGGGSDIQMTQSPSSLSASVGDRVTITCRASQSISSWLAWYQQKPGKAPKLLIYAASSLQSGVPSRFSGSGSGTDFTLTISSLQPEDFATYYCLQDYSYPLTFGGGTKVEIKTTTPAPRPPTPAPTIASQPLSLRPEACRPAAGGAVHTRGLDFACDIYIWAPLAGTCGVLLLSLVITLYCRRDQRLPPDAHKPPGGGSFRTPIQEEQADAHSTLAKIRVKFSRSADAPAYQQGQNQLYNELNLGRREEYDVLDKRRGRDPEMGGKPRRKNPQEGLYNELQKDKMAEAYSEIGMKGERRRGKGHDGLYQGLSTATKDTYDALHMQALPPR

SEQ ID NO: 960 - protein, 497 aa, synthetic construct
MALPVTALLLPLALLLHAARPDYKDDDDKGGGGSGGGGSQVQLVQSGAEVKKPGSSVKVSCKASGGTFSSYAISWVRQAPGQGLEWMGWMNPNSGNTGYAQKFQGRVTITADESTSTAYMELSSLRSEDTAVYYCAWGVDPYYFDYWGQGTLVTVSSGGGGSGGGGSGGGGSDIQMTQSPSSLSASVGDRVTITCRASQSINRWLAWYQQKPGKAPKLLIYDASNLETGVPSRFSGSGSGTDFTLTISSLQPEDFATYYCQQSYITPLTFGGGTKVEIKTTTPAPRPPTPAPTIASQPLSLRPEACRPAAGGAVHTRGLDFACDIYIWAPLAGTCGVLLLSLVITLYCRRDQRLPPDAHKPPGGGSFRTPIQEEQADAHSTLAKIRVKFSRSADAPAYQQGQNQLYNELNLGRREEYDVLDKRRGRDPEMGGKPRRKNPQEGLYNELQKDKMAEAYSEIGMKGERRRGKGHDGLYQGLSTATKDTYDALHMQALPPR

SEQ ID NO: 961 - protein, 497 aa, synthetic construct
MALPVTALLLPLALLLHAARPDYKDDDDKGGGGSGGGGSQVQLVQSGAEVKKPGASVKVSCKASGYTFTSYYMHWVRQAPGQGLEWMGIFNPSDGSTSYAQKFQGRVTMTRDTSTSTVYMELSSLRSEDTAVYYCARDVGETTFDPWGQGTLVTVSSGGGGSGGGGSGGGGSDIQMTQSPSSLSASVGDRVTITCQASQDISNYLNWYQQKPGKAPKLLIYDASSLESGVPSRFSGSGSGTDFTLTISSLQPEDFATYYCQQTNSFPITFGQGTRLEIKTTTPAPRPPTPAPTIASQPLSLRPEACRPAAGGAVHTRGLDFACDIYIWAPLAGTCGVLLLSLVITLYCRRDQRLPPDAHKPPGGGSFRTPIQEEQADAHSTLAKIRVKFSRSADAPAYQQGQNQLYNELNLGRREEYDVLDKRRGRDPEMGGKPRRKNPQEGLYNELQKDKMAEAYSEIGMKGERRRGKGHDGLYQGLSTATKDTYDALHMQALPPR

SEQ ID NO: 962 - protein, 502 aa, synthetic construct
MALPVTALLLPLALLLHAARPDYKDDDDKGGGGSGGGGSQVQLVQSGAEVKKPGASVKVSCKASGYTFTSYGISWVRQAPGQGLEWMGWISAYNGHTNYAQKFQGRVTMTRDTSTSTVYMELSSLRSEDTAVYYCARDSVRGWDYYYGMGVWGQGTTVTVSSGGGGSGGGGSGGGGSDIQMTQSPSSLSASVGDRVTITCQASQDIRNFLNWYQQKPGKAPKLLIYAASTLQSGVPSRFSGSGSGTDFTLTISSLQPEDFATYYCQQSYSAPSTFGQGTKLEIKTTTPAPRPPTPAPTIASQPLSLRPEACRPAAGGAVHTRGLDFACDIYIWAPLAGTCGVLLLSLVITLYCRRDQRLPPDAHKPPGGGSFRTPIQEEQADAHSTLAKIRVKFSRSADAPAYQQGQNQLYNELNLGRREEYDVLDKRRGRDPEMGGKPRRKNPQEGLYNELQKDKMAEAYSEIGMKGERRRGKGHDGLYQGLSTATKDTYDALHMQALPPR

SEQ ID NO: 963 - protein, 499 aa, synthetic construct
MALPVTALLLPLALLLHAARPDYKDDDDKGGGGSGGGGSQVQLVQSGAEVKKPGSSVKVSCKASGYTFIDYYMHWVRQAPGQGLEWMGWMNPHSGNSDNAPKFQGRVTITADESTSTAYMELSSLRSEDTAVYYCARGYSGYDLTADYWGQGTLVTVSSGGGGSGGGGSGGGGSDIQMTQSPSSLSASVGDRVTITCRASQSISNYLNWYQQKPGKAPKLLIYDASNLETGVPSRFSGSGSGTDFTLTISSLQPEDFATYYCQQSYSTPITFGQGTRLEIKTTTPAPRPPTPAPTIASQPLSLRPEACRPAAGGAVHTRGLDFACDIYIWAPLAGTCGVLLLSLVITLYCRRDQRLPPDAHKPPGGGSFRTPIQEEQADAHSTLAKIRVKFSRSADAPAYQQGQNQLYNELNLGRREEYDVLDKRRGRDPEMGGKPRRKNPQEGLYNELQKDKMAEAYSEIGMKGERRRGKGHDGLYQGLSTATKDTYDALHMQALPPR

SEQ ID NO: 964 - protein, 508 aa, synthetic construct
MALPVTALLLPLALLLHAARPDYKDDDDKGGGGSGGGGSQVQLVQSGAEVKKPGASVKVSCKASGYTFTGQYMHWVRQAPGQGLEWMGWINPNTGDTNYAQKFQGRVTMTRDTSTSTVYMELSSLRSEDTAVYYCARDSVFEVEGGTDYYYYYGMDVWGQGTMVTVSSGGGGSGGGGSGGGGSDIQMTQSPSSLSASVGDRVTITCRASETISGWLAWYQQKPGKAPKLLIYDASNLETGVPSRFSGSGSGTDFTLTISSLQPEDFATYYCQQSYSTPWTFGQGTKLEIKTTTPAPRPPTPAPTIASQPLSLRPEACRPAAGGAVHTRGLDFACDIYIWAPLAGTCGVLLLSLVITLYCRRDQRLPPDAHKPPGGGSFRTPIQEEQADAHSTLAKIRVKFSRSADAPAYQQGQNQLYNELNLGRREEYDVLDKRRGRDPEMGGKPRRKNPQEGLYNELQKDKMAEAYSEIGMKGERRRGKGHDGLYQGLSTATKDTYDALHMQALPPR

SEQ ID NO: 965 - protein, 498 aa, synthetic construct
MALPVTALLLPLALLLHAARPDYKDDDDKGGGGSGGGGSQVQLVQSGAEVKKPGASVKVSCKASGYTFTSYDINWVRQAPGQGLEWMGVINPSGGGTSYAQKFQGRVTMTRDTSTSTVYMELSSLRSEDTAVYYCARYSGYDWVFDYWGQGTLVTVSSGGGGSGGGGSGGGGSDIQMTQSPSSLSASVGDRVTITCRASQGIGSWLAWYQQKPGKAPKLLIYAASTLQSGVPSRFSGSGSGTDFTLTISSLQPEDFATYYCQQSYSTPWTFGPGTKVDIKTTTPAPRPPTPAPTIASQPLSLRPEACRPAAGGAVHTRGLDFACDIYIWAPLAGTCGVLLLSLVITLYCRRDQRLPPDAHKPPGGGSFRTPIQEEQADAHSTLAKIRVKFSRSADAPAYQQGQNQLYNELNLGRREEYDVLDKRRGRDPEMGGKPRRKNPQEGLYNELQKDKMAEAYSEIGMKGERRRGKGHDGLYQGLSTATKDTYDALHMQALPPR

SEQ ID NO: 966 - protein, 499 aa, synthetic construct
MALPVTALLLPLALLLHAARPDYKDDDDKGGGGSGGGGSQVQLVQSGAEVKKPGASVKVSCKASGYTFANYYMHWVRQAPGQGLEWMGIINPSGGSTSYAQKFQGRVTMTRDTSTSTVYMELSSLRSEDTAVYYCARDSGSYFGWFDPWGQGTLVTVSSGGGGSGGGGSGGGGSDIQMTQSPSSLSASVGDRVTITCRASQSISSSLAWYQQKPGKAPKLLIYDASSLQSGVPSRFSGSGSGTDFTLTISSLQPEDFATYYCQQSYNTPPTFGGGTKLEIKTTTPAPRPPTPAPTIASQPLSLRPEACRPAAGGAVHTRGLDFACDIYIWAPLAGTCGVLLLSLVITLYCRRDQRLPPDAHKPPGGGSFRTPIQEEQADAHSTLAKIRVKFSRSADAPAYQQGQNQLYNELNLGRREEYDVLDKRRGRDPEMGGKPRRKNPQEGLYNELQKDKMAEAYSEIGMKGERRRGKGHDGLYQGLSTATKDTYDALHMQALPPR

SEQ ID NO: 967 - protein, 499 aa, synthetic construct
MALPVTALLLPLALLLHAARPDYKDDDDKGGGGSGGGGSQVQLVQSGAEVKKPGASVKVSCKASGYTFTTYYMHWVRQAPGQGLEWMGIINPTGGSTYYAQKFQGRVTMTRDTSTSTVYMELSSLRSEDTAVYYCARDSGNYQGIFDYWGQGTLVTVSSGGGGSGGGGSGGGGSDIQMTQSPSSLSASVGDRVTITCRASQGIGGYLAWYQQKPGKAPKLLIYDASNLETGVPSRFSGSGSGTDFTLTISSLQPEDFATYYCQQSYDSPPTFGQGTRLEIKTTTPAPRPPTPAPTIASQPLSLRPEACRPAAGGAVHTRGLDFACDIYIWAPLAGTCGVLLLSLVITLYCRRDQRLPPDAHKPPGGGSFRTPIQEEQADAHSTLAKIRVKFSRSADAPAYQQGQNQLYNELNLGRREEYDVLDKRRGRDPEMGGKPRRKNPQEGLYNELQKDKMAEAYSEIGMKGERRRGKGHDGLYQGLSTATKDTYDALHMQALPPR

SEQ ID NO: 968 - protein, 498 aa, synthetic construct
MALPVTALLLPLALLLHAARPDYKDDDDKGGGGSGGGGSQVQLVQSGAEVKKPGASVKVSCKASGNTFTSYYMHWVRQAPGQGLEWMGWINPNSGDTNYAQNFQGRVTMTRDTSTSTVYMELSSLRSEDTAVYYCARGVSGYDLFDYWGQGTLVTVSSGGGGSGGGGSGGGGSDIQMTQSPSSLSASVGDRVTITCRASQSVSSYLNWYQQKPGKAPKLLIYDTSNLETGVPSRFSGSGSGTDFTLTISSLQPEDFATYYCQQAHSFPLTFGGGTKVEIKTTTPAPRPPTPAPTIASQPLSLRPEACRPAAGGAVHTRGLDFACDIYIWAPLAGTCGVLLLSLVITLYCRRDQRLPPDAHKPPGGGSFRTPIQEEQADAHSTLAKIRVKFSRSADAPAYQQGQNQLYNELNLGRREEYDVLDKRRGRDPEMGGKPRRKNPQEGLYNELQKDKMAEAYSEIGMKGERRRGKGHDGLYQGLSTATKDTYDALHMQALPPR

SEQ ID NO: 969 - protein, 498 aa, synthetic construct
MALPVTALLLPLALLLHAARPDYKDDDDKGGGGSGGGGSEVQLVESGGGLVKPGGSLRLSCAASGFTFSSYGMHWVRQAPGKGLEWVASIKHDGSEQYYVDSVKGRFTISRDDSKNTLYLQMNSLKTEDTAVYYCAASGVDVWGQGTTVTVSSGGGGSGGGGSGGGGSDIVMTQSPLSLPVTPGEPASISCRSSQSLLHSNGYNYLDWYLQKPGQSPQLLIYLGSTRASGVPDRFSGSGSGTDFTLKISRVEAEDVGVYYCMQALDTPLTFGGGTKLEIKTTTPAPRPPTPAPTIASQPLSLRPEACRPAAGGAVHTRGLDFACDIYIWAPLAGTCGVLLLSLVITLYCRRDQRLPPDAHKPPGGGSFRTPIQEEQADAHSTLAKIRVKFSRSADAPAYQQGQNQLYNELNLGRREEYDVLDKRRGRDPEMGGKPRRKNPQEGLYNELQKDKMAEAYSEIGMKGERRRGKGHDGLYQGLSTATKDTYDALHMQALPPR

SEQ ID NO: 970 - protein, 501 aa, synthetic construct
MALPVTALLLPLALLLHAARPDYKDDDDKGGGGSGGGGSQVQLVQSGAEVKKPGASVKVSCKASGGTFSRYDINWVRQAPGQGLEWVGIIDPTGASTSYAQKFQGRVTMTRDTSTSTVYMELSSLRSEDTAVYYCARDYSYGMDYYGMDVWGQGTLVTVSSGGGGSGGGGSGGGGSDIQMTQSPSSLSASVGDRVTITCQASQDISNYLNWYQQKPGKAPKLLIYDTSNLQTGVPSRFSGSGSGTDFTLTISSLQPEDFATYYLSTDLQTTAHFGQGTKVEIKTTTPAPRPPTPAPTIASQPLSLRPEACRPAAGGAVHTRGLDFACDIYIWAPLAGTCGVLLLSLVITLYCRRDQRLPPDAHKPPGGGSFRTPIQEEQADAHSTLAKIRVKFSRSADAPAYQQGQNQLYNELNLGRREEYDVLDKRRGRDPEMGGKPRRKNPQEGLYNELQKDKMAEAYSEIGMKGERRRGKGHDGLYQGLSTATKDTYDALHMQALPPR

SEQ ID NO: 971 - protein, 503 aa, synthetic construct
MALPVTALLLPLALLLHAARPDYKDDDDKGGGGSGGGGSQVQLVQSGAEVKKPGSSVKVSCKASGYTFTSYGISWVRQAPGQGLEWMGGIIPIFGTTNYAQKFQGRVTITADESTSTAYMELSSLRSEDTAVYYCARDHSGDGYFDLWGRGTLVTVSSGGGGSGGGGSGGGGSDIVMTQSPLSLPVTPGEPASISCRSSQSLLHSNGYNYLDWYLQKPGQSPQLLIYDASSLQSGVPDRFSGSGSGTDFTLKISRVEAEDVGVYYCMQGTHWPPTFGQGTKVEIKTTTPAPRPPTPAPTIASQPLSLRPEACRPAAGGAVHTRGLDFACDIYIWAPLAGTCGVLLLSLVITLYCRRDQRLPPDAHKPPGGGSFRTPIQEEQADAHSTLAKIRVKFSRSADAPAYQQGQNQLYNELNLGRREEYDVLDKRRGRDPEMGGKPRRKNPQEGLYNELQKDKMAEAYSEIGMKGERRRGKGHDGLYQGLSTATKDTYDALHMQALPPR

SEQ ID NO: 972 - protein, 497 aa, synthetic construct
MALPVTALLLPLALLLHAARPDYKDDDDKGGGGSGGGGSQVQLVQSGAEVKKPGASVKVSCKASGYTFTENEMHWVRQAPGQGLEWMGWINPNSGGTNYAQKFQGRVTMTRDTSTSTVYMELSSLRSEDTAVYYCAGSWGGYYFDYWGQGTLVTVSSGGGGSGGGGSGGGGSDIQMTQSPSSLSASVGDRVTITCRASQSVSRYLNWYQQKPGKAPKLLIYDASNLETGVPSRFSGSGSGTDFTLTISSLQPEDFATYYCQQADSFPVTFGQGTKLEIKTTTPAPRPPTPAPTIASQPLSLRPEACRPAAGGAVHTRGLDFACDIYIWAPLAGTCGVLLLSLVITLYCRRDQRLPPDAHKPPGGGSFRTPIQEEQADAHSTLAKIRVKFSRSADAPAYQQGQNQLYNELNLGRREEYDVLDKRRGRDPEMGGKPRRKNPQEGLYNELQKDKMAEAYSEIGMKGERRRGKGHDGLYQGLSTATKDTYDALHMQALPPR

SEQ ID NO: 973 - protein, 500 aa, synthetic construct
MALPVTALLLPLALLLHAARPDYKDDDDKGGGGSGGGGSQVQLVQSGAEVKKPGASVKVSCKASGYTFTNYYIYWVRQAPGQGLEWMGWINPNDGATNYAQKFQGRVTMTRDTSTSTVYMELSSLRSEDTAVYYCAREGNDYYYYFMDYWGQGTLVTVSSGGGGSGGGGSGGGGSDIQMTQSPSSLSASVGDRVTITCRASQGISNNLNWYQQKPGKAPKLLIYHASNLETGVPSRFSGSGSGTDFTLTISSLQPEDFATYYCQQSYDGPMTFGQGTKLEIKTTTPAPRPPTPAPTIASQPLSLRPEACRPAAGGAVHTRGLDFACDIYIWAPLAGTCGVLLLSLVITLYCRRDQRLPPDAHKPPGGGSFRTPIQEEQADAHSTLAKIRVKFSRSADAPAYQQGQNQLYNELNLGRREEYDVLDKRRGRDPEMGGKPRRKNPQEGLYNELQKDKMAEAYSEIGMKGERRRGKGHDGLYQGLSTATKDTYDALHMQALPPR

SEQ ID NO: 974 - protein, 506 aa, synthetic construct
MALPVTALLLPLALLLHAARPDYKDDDDKGGGGSGGGGSQVQLVQSGAEVKKPGSSVKVSCKASGGTFSSYAISWVRQAPGQGLEWMGGITPMFGTTDYAQKFQGRVTITADESTSTAYMELSSLRSEDTAVYYCARDERDGYATVAFDIWGQGTMVTVSSGGGGSGGGGSGGGGSDIVMTQSPLSLPVTPGEPASISCRSSQSLLHSNGYNYLDWYLQKPGQSPQLLIYDASNLETGVPDRFSGSGSGTDFTLKISRVEAEDVGVYYCMQGTHWPPTFGQGTKVEIKTTTPAPRPPTPAPTIASQPLSLRPEACRPAAGGAVHTRGLDFACDIYIWAPLAGTCGVLLLSLVITLYCRRDQRLPPDAHKPPGGGSFRTPIQEEQADAHSTLAKIRVKFSRSADAPAYQQGQNQLYNELNLGRREEYDVLDKRRGRDPEMGGKPRRKNPQEGLYNELQKDKMAEAYSEIGMKGERRRGKGHDGLYQGLSTATKDTYDALHMQALPPR

SEQ ID NO: 975 - protein, 501 aa, synthetic construct
MALPVTALLLPLALLLHAARPDYKDDDDKGGGGSGGGGSQVQLVQSGAEVKKPGASVKVSCKASGYTFTSYYMHWVRQAPGQGLEWMGIINPSDGGTSYADKFQGRVTMTRDTSTSTVYMELSSLRSEDTAVYYCARALAPLGWGDGMDVWGQGTTVTVSSGGGGSGGGGSGGGGSDIQMTQSPSSLSASVGDRVTITCQASQDISNYLNWYQQKPGKAPKLLIYDASNLETGVPSRFSGSGSGTDFTLTISSLQPEDFATYYCQQSYDGPITFGQGTRLEIKTTTPAPRPPTPAPTIASQPLSLRPEACRPAAGGAVHTRGLDFACDIYIWAPLAGTCGVLLLSLVITLYCRRDQRLPPDAHKPPGGGSFRTPIQEEQADAHSTLAKIRVKFSRSADAPAYQQGQNQLYNELNLGRREEYDVLDKRRGRDPEMGGKPRRKNPQEGLYNELQKDKMAEAYSEIGMKGERRRGKGHDGLYQGLSTATKDTYDALHMQALPPR

SEQ ID NO: 976 - protein, 498 aa, synthetic construct
MALPVTALLLPLALLLHAARPDYKDDDDKGGGGSGGGGSQVQLVQSGAEVKKPGSSVKVSCKASGYTFTSYYIHWVRQAPGQGLEWMGWMNPSSGVTNFAQKFQGRVTITADESTSTAYMELSSLRSEDTAVYYCARGSDQGDWSDPWGQGTLVTVSSGGGGSGGGGSGGGGSDIQMTQSPSSLSASVGDRVTITCRASQSISSYLNWYQQKPGKAPKLLIYDASNLETGVPSRFSGSGSGTDFTLTISSLQPEDFATYYCQQSYNTPPTFGGGTKVEIKTTTPAPRPPTPAPTIASQPLSLRPEACRPAAGGAVHTRGLDFACDIYIWAPLAGTCGVLLLSLVITLYCRRDQRLPPDAHKPPGGGSFRTPIQEEQADAHSTLAKIRVKFSRSADAPAYQQGQNQLYNELNLGRREEYDVLDKRRGRDPEMGGKPRRKNPQEGLYNELQKDKMAEAYSEIGMKGERRRGKGHDGLYQGLSTATKDTYDALHMQALPPR

SEQ ID NO: 977 - protein, 501 aa, synthetic construct
MALPVTALLLPLALLLHAARPDYKDDDDKGGGGSGGGGSQVQLVQSGAEVKKPGASVKVSCKASGYTFTDSYIHWVRQAPGQGLEWIGWMNPNTGDTGYAQKFQGRVTMTRDTSTSTVYMELSSLRSEDTAVYYCAKDDFGELAPATFDPWGQGTLVTVSSGGGGSGGGGSGGGGSDIQMTQSPSSLSASVGDRVTITCQASQDISNYLNWYQQKPGKAPKLLIYGASSLQSGVPSRFSGSGSGTDFTLTISSLQPEDFATYYCLQDAATPITFGQGTRLEIKTTTPAPRPPTPAPTIASQPLSLRPEACRPAAGGAVHTRGLDFACDIYIWAPLAGTCGVLLLSLVITLYCRRDQRLPPDAHKPPGGGSFRTPIQEEQADAHSTLAKIRVKFSRSADAPAYQQGQNQLYNELNLGRREEYDVLDKRRGRDPEMGGKPRRKNPQEGLYNELQKDKMAEAYSEIGMKGERRRGKGHDGLYQGLSTATKDTYDALHMQALPPR

SEQ ID NO: 978 - protein, 501 aa, synthetic construct
MALPVTALLLPLALLLHAARPDYKDDDDKGGGGSGGGGSQVQLVQSGAEVKKPGASVKVSCKASGYTFTSYDINWVRQAPGQGLEWMGVISPSGGGTSYAQKFQGRVTMTRDTSTSTVYMELSSLRSEDTAVYYCARYYGGNPEGWYFDLWGRGTLVTVSSGGGGSGGGGSGGGGSDIQMTQSPSSLSASVGDRVTITCRASQSIGNWLAWYQQKPGKAPKLLIYDASDLETGVPSRFSGSGSGTDFTLTISSLQPEDFATYYCQQSYTTPWTFGQGTKVEIKTTTPAPRPPTPAPTIASQPLSLRPEACRPAAGGAVHTRGLDFACDIYIWAPLAGTCGVLLLSLVITLYCRRDQRLPPDAHKPPGGGSFRTPIQEEQADAHSTLAKIRVKFSRSADAPAYQQGQNQLYNELNLGRREEYDVLDKRRGRDPEMGGKPRRKNPQEGLYNELQKDKMAEAYSEIGMKGERRRGKGHDGLYQGLSTATKDTYDALHMQALPPR

SEQ ID NO: 979 - protein, 516 aa, synthetic construct
MALPVTALLLPLALLLHAARPDYKDDDDKGGGGSGGGGSEVQLLESGGGLVQPGGSLRLSCAASGFVFDDYAIHWVRQAPGKGLEWVAAISYDGSNKYYADSVKGRFTISRDNSKNTLYLQMNSLRAEDTAVYYCARAPQYYGSGTDPLEVRYYYYGMDVWGQGTTVTVSSGGGGSGGGGSGGGGSDIVMTQSPLSLPVTPGEPASISCRSSQSLLHSNGYNYLDWYLQKPGQSPQLLIYEVSNRASGVPDRFSGSGSGTDFTLKISRVEAEDVGVYYCMKGLQTPLTFGPGTKVDIKTTTPAPRPPTPAPTIASQPLSLRPEACRPAAGGAVHTRGLDFACDIYIWAPLAGTCGVLLLSLVITLYCRRDQRLPPDAHKPPGGGSFRTPIQEEQADAHSTLAKIRVKFSRSADAPAYQQGQNQLYNELNLGRREEYDVLDKRRGRDPEMGGKPRRKNPQEGLYNELQKDKMAEAYSEIGMKGERRRGKGHDGLYQGLSTATKDTYDALHMQALPPR

SEQ ID NO: 980 - protein, 501 aa, synthetic construct
MALPVTALLLPLALLLHAARPDYKDDDDKGGGGSGGGGSQVQLVQSGAEVKKPGSSVKVSCKASGGTFRNYAISWVRQAPGQGLEWMGGIIPIFGTANYAQKFQGRVTITADESTSTAYMELSSLRSEDTAVYYCARDHSAGTHHDAFDIWGQGTMVTVSSGGGGSGGGGSGGGGSDIQMTQSPSSLSASVGDRVTITCRASQGISNYLAWYQQKPGKAPKLLIYAASSLQSGVPSRFSGSGSGTDFTLTISSLQPEDFATYYCQQSHSTPLTFGQGTKVEIKTTTPAPRPPTPAPTIASQPLSLRPEACRPAAGGAVHTRGLDFACDIYIWAPLAGTCGVLLLSLVITLYCRRDQRLPPDAHKPPGGGSFRTPIQEEQADAHSTLAKIRVKFSRSADAPAYQQGQNQLYNELNLGRREEYDVLDKRRGRDPEMGGKPRRKNPQEGLYNELQKDKMAEAYSEIGMKGERRRGKGHDGLYQGLSTATKDTYDALHMQALPPR

SEQ ID NO: 981 - protein, 496 aa, synthetic construct
MALPVTALLLPLALLLHAARPDYKDDDDKGGGGSGGGGSQVQLVQSGAEVKKPGASVKVSCKASGYTFTSYYIHWVRQAPGQGLEWMGWMNPNSGNAGYAQKFQGRVTMTRDTSTSTVYMELSSLRSEDTAVYYCAREYWGSFDYWGQGTLVTVSSGGGGSGGGGSGGGGSDIQMTQSPSSLSASVGDRVTITCRASQGISNNLNWYQQKPGKAPKLLIYDASNLETGVPSRFSGSGSGTDFTLTISSLQPEDFATYYCQQSYSTPYTFGQGTKVEIKTTTPAPRPPTPAPTIASQPLSLRPEACRPAAGGAVHTRGLDFACDIYIWAPLAGTCGVLLLSLVITLYCRRDQRLPPDAHKPPGGGSFRTPIQEEQADAHSTLAKIRVKFSRSADAPAYQQGQNQLYNELNLGRREEYDVLDKRRGRDPEMGGKPRRKNPQEGLYNELQKDKMAEAYSEIGMKGERRRGKGHDGLYQGLSTATKDTYDALHMQALPPR

SEQ ID NO: 982 - protein, 497 aa, synthetic construct
MALPVTALLLPLALLLHAARPDYKDDDDKGGGGSGGGGSQVQLVQSGAEVKKPGASVKVSCKASGYTFTGYYMHWVRQAPGQGLEWMGMIDPSDGSTIYAQKFQGRVTMTRDTSTSTVYMELSSLRSEDTAVYYCARERPLYASDLWGQGTLVTVSSGGGGSGGGGSGGGGSDIQMTQSPSSLSASVGDRVTITCRASQDIGNDLGWYQQKPGKAPKLLIYAASSLQSGVPSRFSGSGSGTDFTLTISSLQPEDFATYYCLQDYDYPLTFGQGTKVEIKTTTPAPRPPTPAPTIASQPLSLRPEACRPAAGGAVHTRGLDFACDIYIWAPLAGTCGVLLLSLVITLYCRRDQRLPPDAHKPPGGGSFRTPIQEEQADAHSTLAKIRVKFSRSADAPAYQQGQNQLYNELNLGRREEYDVLDKRRGRDPEMGGKPRRKNPQEGLYNELQKDKMAEAYSEIGMKGERRRGKGHDGLYQGLSTATKDTYDALHMQALPPR

SEQ ID NO: 983 - protein, 498 aa, synthetic construct
MALPVTALLLPLALLLHAARPDYKDDDDKGGGGSGGGGSQVQLVQSGAEVKKPGSSVKVSCKASGYTFTNYYMHWVRQAPGQGLEWMGWMNPDSGNTGYAQKFQGRVTITADESTSTAYMELSSLRSEDTAVYYCARSSSSWPDFDLWGRGTLVTVSSGGGGSGGGGSGGGGSDIQMTQSPSSLSASVGDRVTITCRASQSISSYLNWYQQKPGKAPKLLIYDASNLETGVPSRFSGSGSGTDFTLTISSLQPEDFATYYCQQSYNTPYSFGQGTKVEIKTTTPAPRPPTPAPTIASQPLSLRPEACRPAAGGAVHTRGLDFACDIYIWAPLAGTCGVLLLSLVITLYCRRDQRLPPDAHKPPGGGSFRTPIQEEQADAHSTLAKIRVKFSRSADAPAYQQGQNQLYNELNLGRREEYDVLDKRRGRDPEMGGKPRRKNPQEGLYNELQKDKMAEAYSEIGMKGERRRGKGHDGLYQGLSTATKDTYDALHMQALPPR

SEQ ID NO: 984 - protein, 499 aa, synthetic construct
MALPVTALLLPLALLLHAARPDYKDDDDKGGGGSGGGGSQVQLVQSGAEVKKPGASVKVSCKASGYTFTSYSMHWVRQAPGQGLEWVGIINPSSGSASYAQKFQGRVTMTRDTSTSTVYMELSSLRSEDTAVYYCARERGAYSSTFDYWGQGTLVTVSSGGGGSGGGGSGGGGSDIQMTQSPSSLSASVGDRVTITCRTSQSISSYLNWYQQKPGKAPKLLIYDASNLETGVPSRFSGSGSGTDFTLTISSLQPEDFATYYCLQDYSYPLTFGQGTKVEIKTTTPAPRPPTPAPTIASQPLSLRPEACRPAAGGAVHTRGLDFACDIYIWAPLAGTCGVLLLSLVITLYCRRDQRLPPDAHKPPGGGSFRTPIQEEQADAHSTLAKIRVKFSRSADAPAYQQGQNQLYNELNLGRREEYDVLDKRRGRDPEMGGKPRRKNPQEGLYNELQKDKMAEAYSEIGMKGERRRGKGHDGLYQGLSTATKDTYDALHMQALPPR

SEQ ID NO: 985 - protein, 499 aa, synthetic construct
MALPVTALLLPLALLLHAARPDYKDDDDKGGGGSGGGGSQVQLVQSGAEVKKPGASVKVSCKASGYTFTDYYMHWVRQAPGQGLEWMGVINPSDGTAHYAQRLQGRVTMTRDTSTSTVYMELSSLRSEDTAVYYCARDSGSYYADFDYWGQGTLVTVSSGGGGSGGGGSGGGGSDIQMTQSPSSLSASVGDRVTITCQASQDISNYLNWYQQKPGKAPKLLIYDASSLQSGVPSRFSGSGSGTDFTLTISSLQPEDFATYYCQQSYSTPPAFGQGTKVEIKTTTPAPRPPTPAPTIASQPLSLRPEACRPAAGGAVHTRGLDFACDIYIWAPLAGTCGVLLLSLVITLYCRRDQRLPPDAHKPPGGGSFRTPIQEEQADAHSTLAKIRVKFSRSADAPAYQQGQNQLYNELNLGRREEYDVLDKRRGRDPEMGGKPRRKNPQEGLYNELQKDKMAEAYSEIGMKGERRRGKGHDGLYQGLSTATKDTYDALHMQALPPR

SEQ ID NO: 986 - protein, 764 aa, synthetic construct
MALPVTALLLPLALLLHAARPDYKDDDDKGGGGSGGGGSQVQLVQSGAEVKKPGASVKVSCKASGYSFTSYYMHWVRQAPGQGLEWMGIINPSGGTTSYAQKFQGRVTMTRDTSTSTVYMELSSLRSEDTAVYYCARDNSPYSSSWWDYFDYWGQGTLVTVSSGGGGSGGGGSGGGGSDIQMTQSPSSLSASVGDRVTITCRASQDIRHYLAWYQQKPGKAPKLLIYDASSLQSGVPSRFSGSGSGTDFTLTISSLQPEDFATYYCQQTYDAPITFGQGTRLEIKGGGGSGGGGSGGGGSQVQLVQSGAEVKKPGASVKVSCKASGYSFTSYYMHWVRQAPGQGLEWMGIINPSGGTTSYAQKFQGRVTMTRDTSTSTVYMELSSLRSEDTAVYYCARDNSPYSSSWWDYFDYWGQGTLVTVSSGGGGSGGGGSGGGGSDIQMTQSPSSLSASVGDRVTITCRASQDIRHYLAWYQQKPGKAPKLLIYDASSLQSGVPSRFSGSGSGTDFTLTISSLQPEDFATYYCQQTYDAPITFGQGTRLEIKTTTPAPRPPTPAPTIASQPLSLRPEACRPAAGGAVHTRGLDFACDIYIWAPLAGTCGVLLLSLVITLYCRRDQRLPPDAHKPPGGGSFRTPIQEEQADAHSTLAKIRVKFSRSADAPAYQQGQNQLYNELNLGRREEYDVLDKRRGRDPEMGGKPRRKNPQEGLYNELQKDKMAEAYSEIGMKGERRRGKGHDGLYQGLSTATKDTYDALHMQALPPR

SEQ ID NO: 987 - protein, 764 aa, synthetic construct
MALPVTALLLPLALLLHAARPDYKDDDDKGGGGSGGGGSQVQLVQSGAEVKKPGSSVKVSCKASGYTFTSYGISWVRQAPGQGLEWMGGIIPIFGTTNYAQKFQGRVTITADESTSTAYMELSSLRSEDTAVYYCARDHSGDGYFDLWGRGTLVTVSSGGGGSGGGGSGGGGSDIVMTQSPLSLPVTPGEPASISCRSSQSLLHSNGYNYLDWYLQKPGQSPQLLIYDASSLQSGVPDRFSGSGSGTDFTLKISRVEAEDVGVYYCMQGTHWPPTFGQGTKVEIKGGGGSGGGGSGGGGSQVQLVQSGAEVKKPGSSVKVSCKASGYTFTSYGISWVRQAPGQGLEWMGGIIPIFGTTNYAQKFQGRVTITADESTSTAYMELSSLRSEDTAVYYCARDHSGDGYFDLWGRGTLVTVSSGGGGSGGGGSGGGGSDIVMTQSPLSLPVTPGEPASISCRSSQSLLHSNGYNYLDWYLQKPGQSPQLLIYDASSLQSGVPDRFSGSGSGTDFTLKISRVEAEDVGVYYCMQGTHWPPTFGQGTKVEIKTTTPAPRPPTPAPTIASQPLSLRPEACRPAAGGAVHTRGLDFACDIYIWAPLAGTCGVLLLSLVITLYCRRDQRLPPDAHKPPGGGSFRTPIQEEQADAHSTLAKIRVKFSRSADAPAYQQGQNQLYNELNLGRREEYDVLDKRRGRDPEMGGKPRRKNPQEGLYNELQKDKMAEAYSEIGMKGERRRGKGHDGLYQGLSTATKDTYDALHMQALPPR

SEQ ID NO: 988 - protein, 752 aa, synthetic construct
MALPVTALLLPLALLLHAARPDYKDDDDKGGGGSGGGGSQVQLVQSGAEVKKPGASVKVSCKASGYTFTENEMHWVRQAPGQGLEWMGWINPNSGGTNYAQKFQGRVTMTRDTSTSTVYMELSSLRSEDTAVYYCAGSWGGYYFDYWGQGTLVTVSSGGGGSGGGGSGGGGSDIQMTQSPSSLSASVGDRVTITCRASQSVSRYLNWYQQKPGKAPKLLIYDASNLETGVPSRFSGSGSGTDFTLTISSLQPEDFATYYCQQADSFPVTFGQGTKLEIKGGGGSGGGGSGGGGSQVQLVQSGAEVKKPGASVKVSCKASGYTFTENEMHWVRQAPGQGLEWMGWINPNSGGTNYAQKFQGRVTMTRDTSTSTVYMELSSLRSEDTAVYYCAGSWGGYYFDYWGQGTLVTVSSGGGGSGGGGSGGGGSDIQMTQSPSSLSASVGDRVTITCRASQSVSRYLNWYQQKPGKAPKLLIYDASNLETGVPSRFSGSGSGTDFTLTISSLQPEDFATYYCQQADSFPVTFGQGTKLEIKTTTPAPRPPTPAPTIASQPLSLRPEACRPAAGGAVHTRGLDFACDIYIWAPLAGTCGVLLLSLVITLYCRRDQRLPPDAHKPPGGGSFRTPIQEEQADAHSTLAKIRVKFSRSADAPAYQQGQNQLYNELNLGRREEYDVLDKRRGRDPEMGGKPRRKNPQEGLYNELQKDKMAEAYSEIGMKGERRRGKGHDGLYQGLSTATKDTYDALHMQALPPR

SEQ ID NO: 989 - protein, 767 aa, synthetic construct
MALPVTALLLPLALLLHAARPDYKDDDDKGGGGSGGGGSQVQLVQSGAEVKKPGASVKVSCKASGYSFTSYYMHWVRQAPGQGLEWMGIINPSGGTTSYAQKFQGRVTMTRDTSTSTVYMELSSLRSEDTAVYYCARDNSPYSSSWWDYFDYWGQGTLVTVSSGGGGSGGGGSGGGGSDIQMTQSPSSLSASVGDRVTITCRASQDIRHYLAWYQQKPGKAPKLLIYDASSLQSGVPSRFSGSGSGTDFTLTISSLQPEDFATYYCQQTYDAPITFGQGTRLEIKGGGGSGGGGSGGGGSQVQLVQSGAEVKKPGSSVKVSCKASGGTFSSYAISWVRQAPGQGLEWMGGITPMFGTTDYAQKFQGRVTITADESTSTAYMELSSLRSEDTAVYYCARDERDGYATVAFDIWGQGTMVTVSSGGGGSGGGGSGGGGSDIVMTQSPLSLPVTPGEPASISCRSSQSLLHSNGYNYLDWYLQKPGQSPQLLIYDASNLETGVPDRFSGSGSGTDFTLKISRVEAEDVGVYYCMQGTHWPPTFGQGTKVEIKTTTPAPRPPTPAPTIASQPLSLRPEACRPAAGGAVHTRGLDFACDIYIWAPLAGTCGVLLLSLVITLYCRRDQRLPPDAHKPPGGGSFRTPIQEEQADAHSTLAKIRVKFSRSADAPAYQQGQNQLYNELNLGRREEYDVLDKRRGRDPEMGGKPRRKNPQEGLYNELQKDKMAEAYSEIGMKGERRRGKGHDGLYQGLSTATKDTYDALHMQALPPR

SEQ ID NO: 990 - protein, 762 aa, synthetic construct
MALPVTALLLPLALLLHAARPDYKDDDDKGGGGSGGGGSQVQLVQSGAEVKKPGASVKVSCKASGYSFTSYYMHWVRQAPGQGLEWMGIINPSGGTTSYAQKFQGRVTMTRDTSTSTVYMELSSLRSEDTAVYYCARDNSPYSSSWWDYFDYWGQGTLVTVSSGGGGSGGGGSGGGGSDIQMTQSPSSLSASVGDRVTITCRASQDIRHYLAWYQQKPGKAPKLLIYDASSLQSGVPSRFSGSGSGTDFTLTISSLQPEDFATYYCQQTYDAPITFGQGTRLEIKGGGGSGGGGSGGGGSQVQLVQSGAEVKKPGASVKVSCKASGYTFTSYYMHWVRQAPGQGLEWMGIINPSDGGTSYADKFQGRVTMTRDTSTSTVYMELSSLRSEDTAVYYCARALAPLGWGDGMDVWGQGTTVTVSSGGGGSGGGGSGGGGSDIQMTQSPSSLSASVGDRVTITCQASQDISNYLNWYQQKPGKAPKLLIYDASNLETGVPSRFSGSGSGTDFTLTISSLQPEDFATYYCQQSYDGPITFGQGTRLEIKTTTPAPRPPTPAPTIASQPLSLRPEACRPAAGGAVHTRGLDFACDIYIWAPLAGTCGVLLLSLVITLYCRRDQRLPPDAHKPPGGGSFRTPIQEEQADAHSTLAKIRVKFSRSADAPAYQQGQNQLYNELNLGRREEYDVLDKRRGRDPEMGGKPRRKNPQEGLYNELQKDKMAEAYSEIGMKGERRRGKGHDGLYQGLSTATKDTYDALHMQALPPR

SEQ ID NO: 991 - protein, 767 aa, synthetic construct
MALPVTALLLPLALLLHAARPDYKDDDDKGGGGSGGGGSQVQLVQSGAEVKKPGSSVKVSCKASGYTFTSYGISWVRQAPGQGLEWMGGIIPIFGTTNYAQKFQGRVTITADESTSTAYMELSSLRSEDTAVYYCARDHSGDGYFDLWGRGTLVTVSSGGGGSGGGGSGGGGSDIVMTQSPLSLPVTPGEPASISCRSSQSLLHSNGYNYLDWYLQKPGQSPQLLIYDASSLQSGVPDRFSGSGSGTDFTLKISRVEAEDVGVYYCMQGTHWPPTFGQGTKVEIKGGGGSGGGGSGGGGSQVQLVQSGAEVKKPGSSVKVSCKASGGTFSSYAISWVRQAPGQGLEWMGGITPMFGTTDYAQKFQGRVTITADESTSTAYMELSSLRSEDTAVYYCARDERDGYATVAFDIWGQGTMVTVSSGGGGSGGGGSGGGGSDIVMTQSPLSLPVTPGEPASISCRSSQSLLHSNGYNYLDWYLQKPGQSPQLLIYDASNLETGVPDRFSGSGSGTDFTLKISRVEAEDVGVYYCMQGTHWPPTFGQGTKVEIKTTTPAPRPPTPAPTIASQPLSLRPEACRPAAGGAVHTRGLDFACDIYIWAPLAGTCGVLLLSLVITLYCRRDQRLPPDAHKPPGGGSFRTPIQEEQADAHSTLAKIRVKFSRSADAPAYQQGQNQLYNELNLGRREEYDVLDKRRGRDPEMGGKPRRKNPQEGLYNELQKDKMAEAYSEIGMKGERRRGKGHDGLYQGLSTATKDTYDALHMQALPPR

SEQ ID NO: 992 - protein, 762 aa, synthetic construct
MALPVTALLLPLALLLHAARPDYKDDDDKGGGGSGGGGSQVQLVQSGAEVKKPGSSVKVSCKASGYTFTSYGISWVRQAPGQGLEWMGGIIPIFGTTNYAQKFQGRVTITADESTSTAYMELSSLRSEDTAVYYCARDHSGDGYFDLWGRGTLVTVSSGGGGSGGGGSGGGGSDIVMTQSPLSLPVTPGEPASISCRSSQSLLHSNGYNYLDWYLQKPGQSPQLLIYDASSLQSGVPDRFSGSGSGTDFTLKISRVEAEDVGVYYCMQGTHWPPTFGQGTKVEIKGGGGSGGGGSGGGGSQVQLVQSGAEVKKPGASVKVSCKASGYTFTSYYMHWVRQAPGQGLEWMGIINPSDGGTSYADKFQGRVTMTRDTSTSTVYMELSSLRSEDTAVYYCARALAPLGWGDGMDVWGQGTTVTVSSGGGGSGGGGSGGGGSDIQMTQSPSSLSASVGDRVTITCQASQDISNYLNWYQQKPGKAPKLLIYDASNLETGVPSRFSGSGSGTDFTLTISSLQPEDFATYYCQQSYDGPITFGQGTRLEIKTTTPAPRPPTPAPTIASQPLSLRPEACRPAAGGAVHTRGLDFACDIYIWAPLAGTCGVLLLSLVITLYCRRDQRLPPDAHKPPGGGSFRTPIQEEQADAHSTLAKIRVKFSRSADAPAYQQGQNQLYNELNLGRREEYDVLDKRRGRDPEMGGKPRRKNPQEGLYNELQKDKMAEAYSEIGMKGERRRGKGHDGLYQGLSTATKDTYDALHMQALPPR

SEQ ID NO: 993 - protein, 761 aa, synthetic construct
MALPVTALLLPLALLLHAARPDYKDDDDKGGGGSGGGGSQVQLVQSGAEVKKPGASVKVSCKASGYTFTENEMHWVRQAPGQGLEWMGWINPNSGGTNYAQKFQGRVTMTRDTSTSTVYMELSSLRSEDTAVYYCAGSWGGYYFDYWGQGTLVTVSSGGGGSGGGGSGGGGSDIQMTQSPSSLSASVGDRVTITCRASQSVSRYLNWYQQKPGKAPKLLIYDASNLETGVPSRFSGSGSGTDFTLTISSLQPEDFATYYCQQADSFPVTFGQGTKLEIKGGGGSGGGGSGGGGSQVQLVQSGAEVKKPGSSVKVSCKASGGTFSSYAISWVRQAPGQGLEWMGGITPMFGTTDYAQKFQGRVTITADESTSTAYMELSSLRSEDTAVYYCARDERDGYATVAFDIWGQGTMVTVSSGGGGSGGGGSGGGGSDIVMTQSPLSLPVTPGEPASISCRSSQSLLHSNGYNYLDWYLQKPGQSPQLLIYDASNLETGVPDRFSGSGSGTDFTLKISRVEAEDVGVYYCMQGTHWPPTFGQGTKVEIKTTTPAPRPPTPAPTIASQPLSLRPEACRPAAGGAVHTRGLDFACDIYIWAPLAGTCGVLLLSLVITLYCRRDQRLPPDAHKPPGGGSFRTPIQEEQADAHSTLAKIRVKFSRSADAPAYQQGQNQLYNELNLGRREEYDVLDKRRGRDPEMGGKPRRKNPQEGLYNELQKDKMAEAYSEIGMKGERRRGKGHDGLYQGLSTATKDTYDALHMQALPPR

SEQ ID NO: 994 - protein, 756 aa, synthetic construct
MALPVTALLLPLALLLHAARPDYKDDDDKGGGGSGGGGSQVQLVQSGAEVKKPGASVKVSCKASGYTFTENEMHWVRQAPGQGLEWMGWINPNSGGTNYAQKFQGRVTMTRDTSTSTVYMELSSLRSEDTAVYYCAGSWGGYYFDYWGQGTLVTVSSGGGGSGGGGSGGGGSDIQMTQSPSSLSASVGDRVTITCRASQSVSRYLNWYQQKPGKAPKLLIYDASNLETGVPSRFSGSGSGTDFTLTISSLQPEDFATYYCQQADSFPVTFGQGTKLEIKGGGGSGGGGSGGGGSQVQLVQSGAEVKKPGASVKVSCKASGYTFTSYYMHWVRQAPGQGLEWMGIINPSDGGTSYADKFQGRVTMTRDTSTSTVYMELSSLRSEDTAVYYCARALAPLGWGDGMDVWGQGTTVTVSSGGGGSGGGGSGGGGSDIQMTQSPSSLSASVGDRVTITCQASQDISNYLNWYQQKPGKAPKLLIYDASNLETGVPSRFSGSGSGTDFTLTISSLQPEDFATYYCQQSYDGPITFGQGTRLEIKTTTPAPRPPTPAPTIASQPLSLRPEACRPAAGGAVHTRGLDFACDIYIWAPLAGTCGVLLLSLVITLYCRRDQRLPPDAHKPPGGGSFRTPIQEEQADAHSTLAKIRVKFSRSADAPAYQQGQNQLYNELNLGRREEYDVLDKRRGRDPEMGGKPRRKNPQEGLYNELQKDKMAEAYSEIGMKGERRRGKGHDGLYQGLSTATKDTYDALHMQALPPR

SEQ ID NO: 995 - DNA, 14 bp, synthetic construct
  source 1..14: mol_type = other DNA
atgctcaatgcgtc

SEQ ID NO: 996 - DNA, 14 bp, synthetic construct
  source 1..14: mol_type = other DNA
atgctcaatgcgtc

SEQ ID NO: 997 - protein, 505 aa, synthetic construct; identical to SEQ ID NO: 829

SEQ ID NO: 998 - DNA, 1515 bp, synthetic construct
  source 1..1515: mol_type = other DNA
atgtctcgctccgtggccttagctgtgttggcgttgctgtcattgtcaggcctggaggctgtcatggcgccccgaaccctcttcctgggttgcggcggttctggtggtggcggtagtggcggcggaggaagcggtggtggcggttccatccagcgtactccaaagattcaggtttactcacgtcatccagcagagaatggaaagtcaaatttcctgaattgctatgtgtctgggtttcatccatccgacattgaagttgacttactgaagaatggagagagaattgaaaaagtggagcattcagacttgtctttcagcaaggactggtctttctatctcttgtactacactgaatttacccccactgaaaaagatgagtatgcctgccgtgtgaaccatgtgactttgtcacagcccaagatagttaagtgggatcgagacatgggtggtggcggttctggtggtggcggtagtggcggcggaggaagcggtggtggcggttccggctcccactccttgaagtatttccacacttccgtgtcccggcccggccgcggggagccccgcttcatctctgtgggctacgtggacgacacccagttcgtgcgcttcgacaacgacgccgcgagtccgaggatggtgccgcgggcgccgtggatggagcaggaggggtcagagtattgggaccgggagacacggagcgccagggacaccgcacagattttccgagtgaatctgcggacgctgcgcggctgctacaatcagagcgaggccgggtctcacaccctgcagtggatgcatggctgcgagctggggcccgacgggcgcttcctccgcgggtatgaacagttcgcctacgacggcaaggattatctcaccctgaatgaggacctgcgctcctggaccgcggtggacacggcggctcagatctccgagcaaaagtcaaatgatgcctctgaggcggagcaccagagagcctacctggaagacacatgcgtggagtggctccacaaatacctggagaaggggaaggagacgctgcttcacctggagcccccaaagacacacgtgactcaccaccccatctctgaccatgaggccaccctgaggtgctgggccctgggcttctaccctgcggagatcacactgacctggcagcaggatggggagggccatacccaggacacggagctcgtggagaccaggcctgcaggggatggaaccttccagaagtgggcagctgtggtggtgccttctggagaggagcagagatacacgtgccatgtgcagcatgaggggctacccgagcccgtcaccctgagatggaagccggcttcccagcccaccatccccatcgtgggcatcattgctggcctggttctccttggatctgtggtctctggagctgtggttgctgctgtgatatggaggaagaagagctcaggtggaaaaggagggagctactctaaggctgagtggagcgacagtgcccaggggtctgagtctcacagcttg

SEQ ID NO: 999 - protein, 500 aa, synthetic construct
MSRSVALAVLALLSLSGLEAVMAPRTLFLGCGASGGGGSGGGGSIQRTPKIQVYSRHPAENGKSNFLNCYVSGFHPSDIEVDLLKNGERIEKVEHSDLSFSKDWSFYLLYYTEFTPTEKDEYACRVNHVTLSQPKIVKWDRDMGGGGSGGGGSGGGGSGGGGSGSHSLKYFHTSVSRPGRGEPRFISVGYVDDTQFVRFDNDAASPRMVPRAPWMEQEGSEYWDRETRSARDTAQIFRVNLRTLRGCYNQSEAGSHTLQWMHGCELGPDGRFLRGYEQFAYDGKDYLTLNEDLRSWTAVDTAAQISEQKSNDASEAEHQRAYLEDTCVEWLHKYLEKGKETLLHLEPPKTHVTHHPISDHEATLRCWALGFYPAEITLTWQQDGEGHTQDTELVETRPAGDGTFQKWAAVVVPSGEEQRYTCHVQHEGLPEPVTLRWKPASQPTIPIVGIIAGLVLLGSVVSGAVVAAVIWRKKSSGGKGGSYSKAEWSDSAQGSESHSL

SEQ ID NO: 1000 - DNA, 1500 bp, synthetic construct
  source 1..1500: mol_type = other DNA
atgtctcgctccgtggccttagctgtgctcgcgctactctctctttctggcctggaggctgtcatggcgccccgaaccctcttcctgggttgcggcgcctctggtggtggcggtagtggcggcggaggaagcatccagcgtactccaaagattcaggtttactcacgtcatccagcagagaatggaaagtcaaatttcctgaattgctatgtgtctgggtttcatccatccgacattgaagttgacttactgaagaatggagagagaattgaaaaagtggagcattcagacttgtctttcagcaaggactggtctttctatctcttgtactacactgaatttacccccactgaaaaagatgagtatgcctgccgtgtgaaccatgtgactttgtcacagcccaagatagttaagtgggatcgagacatgggtggtggcggttctggtggtggcggtagtggcggcggaggaagcggtggtggcggttccggctcccactccttgaagtatttccacacttccgtgtcccggcccggccgcggggagccccgcttcatctctgtgggctacgtggacgacacccagttcgtgcgcttcgacaacgacgccgcgagtccgaggatggtgccgcgggcgccgtggatggagcaggaggggtcagagtattgggaccgggagacacggagcgccagggacaccgcacagattttccgagtgaatctgcggacgctgcgcggctgctacaatcagagcgaggccgggtctcacaccctgcagtggatgcatggctgcgagctggggcccgacgggcgcttcctccgcgggtatgaacagttcgcctacgacggcaaggattatctcaccctgaatgaggacctgcgctcctggaccgcggtggacacggcggctcagatctccgagcaaaagtcaaatgatgcctctgaggcggagcaccagagagcctacctggaagacacatgcgtggagtggctccacaaatacctggagaaggggaaggagacgctgcttcacctggagcccccaaagacacacgtgactcaccaccccatctctgaccatgaggccaccctgaggtgctgggccctgggcttctaccctgcggagatcacactgacctggcagcaggatggggagggccatacccaggacacggagctcgtggagaccaggcctgcaggggatggaaccttccagaagtgggcagctgtggtggtgccttctggagaggagcagagatacacgtgccatgtgcagcatgaggggctacccgagcccgtcaccctgagatggaagccggcttcccagcccaccatccccatcgtgggcatcattgctggcctggttctccttggatctgtggtctctggagctgtggttgctgctgtgatatggaggaagaagagctcaggtggaaaaggagggagctactctaaggctgagtggagcgacagtgcccaggggtctgagtctcacagcttg

SEQ ID NO: 1001 - DNA, 60 bp, synthetic construct
  source 1..60: mol_type = other DNA
atgtctcgctccgtggccttagctgtgctcgcgctactctctctttctggcctggaggct

SEQ ID NO: 1002 - DNA, 60 bp, synthetic construct
  source 1..60: mol_type = other DNA
atgtctcgctccgtggccttagctgtgttggcgttgctgtcattgtcaggcctggaggct

SEQ ID NO: 1003 - protein, 20 aa, synthetic construct
MSRSVALAVLALLSLSGLEA

SEQ ID NO: 1004 - DNA, 27 bp, synthetic construct
  source 1..27: mol_type = other DNA
gtcatggcgccccgaaccctcttcctg

SEQ ID NO: 1005 - protein, 9 aa, synthetic construct
VMAPRTLFL

SEQ ID NO: 1006 - DNA, 45 bp, synthetic construct
  source 1..45: mol_type = other DNA
ggttgcggcgcctctggtggtggcggtagtggcggcggaggaagc

SEQ ID NO: 1007 - protein, 15 aa, synthetic construct
GCGASGGGGSGGGGS

SEQ ID NO: 1008 - DNA, 60 bp, synthetic construct
  source 1..60: mol_type = other DNA
ggttgcggcggttctggtggtggcggtagtggcggcggaggaagcggtggtggcggttcc

SEQ ID NO: 1009 - protein, 20 aa, synthetic construct
GCGGSGGGGSGGGGSGGGGS

SEQ ID NO: 1010 - DNA, 297 bp, synthetic construct
  source 1..297: mol_type = other DNA
atccagcgtactccaaagattcaggtttactcacgtcatccagcagagaatggaaagtcaaatttcctgaattgctatgtgtctgggtttcatccatccgacattgaagttgacttactgaagaatggagagagaattgaaaaagtggagcattcagacttgtctttcagcaaggactggtctttctatctcttgtactacactgaatttacccccactgaaaaagatgagtatgcctgccgtgtgaaccatgtgactttgtcacagcccaagatagttaagtgggatcgagacatg

SEQ ID NO: 1011 - protein, 99 aa, synthetic construct [sequence omitted]

SEQ ID NO: 1012 - DNA, 1011 bp, synthetic construct
  source 1..1011: mol_type = other DNA
ggctcccactccttgaagtatttccacacttccgtgtcccggcccggccgcggggagccccgcttcatctctgtgggctacgtggacgacacccagttcgtgcgcttcgacaacgacgccgcgagtccgaggatggtgccgcgggcgccgtggatggagcaggaggggtcagagtattgggaccgggagacacggagcgccagggacaccgcacagattttccgagtgaatctgcggacgctgcgcggctgctacaatcagagcgaggccgggtctcacaccctgcagtggatgcatggctgcgagctggggcccgacgggcgcttcctccgcgggtatgaacagttcgcctacgacggcaaggattatctcaccctgaatgaggacctgcgctcctggaccgcggtggacacggcggctcagatctccgagcaaaagtcaaatgatgcctctgaggcggagcaccagagagcctacctggaagacacatgcgtggagtggctccacaaatacctggagaaggggaaggagacgctgcttcacctggagcccccaaagacacacgtgactcaccaccccatctctgaccatgaggccaccctgaggtgctgggccctgggcttctaccctgcggagatcacactgacctggcagcaggatggggagggccatacccaggacacggagctcgtggagaccaggcctgcaggggatggaaccttccagaagtgggcagctgtggtggtgccttctggagaggagcagagatacacgtgccatgtgcagcatgaggggctacccgagcccgtcaccctgagatggaagccggcttcccagcccaccatccccatcgtgggcatcattgctggcctggttctccttggatctgtggtctctggagctgtggttgctgctgtgatatggaggaagaagagctcaggtggaaaaggagggagctactctaaggctgagtggagcgacagtgcccaggggtctgagtctcacagcttg

SEQ ID NO: 1013 - protein, 337 aa, synthetic construct
GSHSLKYFHTSVSRPGRGEPRFISVGYVDDTQFVRFDNDAASPRMVPRAPWMEQEGSEYWDRETRSARDTAQIFRVNLRTLRGCYNQSEAGSHTLQWMHGCELGPDGRFLRGYEQFAYDGKDYLTLNEDLRSWTAVDTAAQISEQKSNDASEAEHQRAYLEDTCVEWLHKYLEKGKETLLHLEPPKTHVTHHPISDHEATLRCWALGFYPAEITLTWQQDGEGHTQDTELVETRPAGDGTFQKWAAVVVPSGEEQRYTCHVQHEGLPEPVTLRWKPASQPTIPIVGIIAGLVLLGSVVSGAVVAAVIWRKKSSGGKGGSYSKAEWSDSAQGSESHSL

SEQ ID NO: 1014 - protein, 504 aa, synthetic construct
SRSVALAVLALLSLSGLEAVMAPRTLFLGCGGSGGGGSGGGGSGGGGSIQRTPKIQVYSRHPAENGKSNFLNCYVSGFHPSDIEVDLLKNGERIEKVEHSDLSFSKDWSFYLLYYTEFTPTEKDEYACRVNHVTLSQPKIVKWDRDMGGGGSGGGGSGGGGSGGGGSGSHSLKYFHTSVSRPGRGEPRFISVGYVDDTQFVRFDNDAASPRMVPRAPWMEQEGSEYWDRETRSARDTAQIFRVNLRTLRGCYNQSEAGSHTLQWMHGCELGPDGRFLRGYEQFAYDGKDYLTLNEDLRSWTAVDTAAQISEQKSNDASEAEHQRAYLEDTCVEWLHKYLEKGKETLLHLEPPKTHVTHHPISDHEATLRCWALGFYPAEITLTWQQDGEGHTQDTELVETRPAGDGTFQKWAAVVVPSGEEQRYTCHVQHEGLPEPVTLRWKPASQPTIPIVGIIAGLVLLGSVVSGAVVAAVIWRKKSSGGKGGSYSKAEWSDSAQGSESHSL

SEQ ID NO: 1015 - protein, 504 aa, synthetic construct; identical to SEQ ID NO: 1014

SEQ ID NO: 1016 - protein, 499 aa, synthetic construct
SRSVALAVLALLSLSGLEAVMAPRTLFLGCGASGGGGSGGGGSIQRTPKIQVYSRHPAENGKSNFLNCYVSGFHPSDIEVDLLKNGERIEKVEHSDLSFSKDWSFYLLYYTEFTPTEKDEYACRVNHVTLSQPKIVKWDRDMGGGGSGGGGSGGGGSGGGGSGSHSLKYFHTSVSRPGRGEPRFISVGYVDDTQFVRFDNDAASPRMVPRAPWMEQEGSEYWDRETRSARDTAQIFRVNLRTLRGCYNQSEAGSHTLQWMHGCELGPDGRFLRGYEQFAYDGKDYLTLNEDLRSWTAVDTAAQISEQKSNDASEAEHQRAYLEDTCVEWLHKYLEKGKETLLHLEPPKTHVTHHPISDHEATLRCWALGFYPAEITLTWQQDGEGHTQDTELVETRPAGDGTFQKWAAVVVPSGEEQRYTCHVQHEGLPEPVTLRWKPASQPTIPIVGIIAGLVLLGSVVSGAVVAAVIWRKKSSGGKGGSYSKAEWSDSAQGSESHSL

SEQ ID NO: 1017 - protein, 499 aa, synthetic construct
SRSVALAVLALLSLSGLEAVMAPRTLFLGGGGSGGGGSGGGGSIQRTPKIQVYSRHPAENGKSNFLNCYVSGFHPSDIEVDLLKNGERIEKVEHSDLSFSKDWSFYLLYYTEFTPTEKDEYACRVNHVTLSQPKIVKWDRDMGGGGSGGGGSGGGGSGGGGSGSHSLKYFHTSVSRPGRGEPRFISVGYVDDTQFVRFDNDAASPRMVPRAPWMEQEGSEYWDRETRSARDTAQIFRVNLRTLRGYYNQSEAGSHTLQWMHGCELGPDRRFLRGYEQFAYDGKDYLTLNEDLRSWTAVDTAAQISEQKSNDASEAEHQRAYLEDTCVEWLHKYLEKGKETLLHLEPPKTHVTHHPISDHEATLRCWALGFYPAEITLTWQQDGEGHTQDTELVETRPAGDGTFQKWAAVVVPSGEEQRYTCHVQHEGLPEPVTLRWKPASQPTIPIVGIIAGLVLLGSVVSGAVVAAVIWRKKSSGGKGGSYYKAEWSDSAQGSESHSL

SEQ ID NO: 1018 - protein, 19 aa, synthetic construct
SRSVALAVLALLSLSGLEA

SEQ ID NO: 1019 - protein, 18 aa, synthetic construct
TYKAAVDLSHFLKEKGGL

SEQ ID NO: 1020 - protein, 513 aa, synthetic construct
SRSVALAVLALLSLSGLEAVMAPRTLFLGGGGSGGGGSGGGGSIQRTPKIQVYSRHPAENGKSNFLNCYVSGFHPSDIEVDLLKNGERIEKVEHSDLSFSKDWSFYLLYYTEFTPTEKDEYACRVNHVTLSQPKIVKWDRDMGGGGSGGGGSGGGGSGGGGSGSMHVLRYGYTGIFDDTSHMTLTVVGIFDGQHFFTYHVNSSDKASSRANGTISWMANVSAAYPTYLDGERAKGDLIFNQTEQNLLELEIALGYRSQSVLTWTHECNTTENGSFVAGYEGFGWDGETLMELKDNLTLWTGPNYEISWLKQNKTYIDGKIKNISEGDTTIQRNYLKGNCTQWSVIYSGFQTPVTHPVVKGGVRNQNDNRAEAFCTSYGFFPGEINITFIHYGNKAPDDSEPQCNPLLPTFDGTFHQGCYVAIFCNQNYTCRVTHGNWTVEIPISVTSPDDSSSGEVPDHPTANKRYNTMTISSVLLALLLCALLFAFLHYFTTLKQYLRNLAFAWRYRKVRSS

SEQ ID NO: 1021 - protein, 764 aa, synthetic construct
SRSVALAVLALLSLSGLEAVMAPRTLFLGCGGSGGGGSGGGGSGGGGSIQRTPKIQVYSRHPAENGKSNFLNCYVSGFHPSDIEVDLLKNGERIEKVEHSDLSFSKDWSFYLLYYTEFTPTEKDEYACRVNHVTLSQPKIVKWDRDMGGGGSGGGGSGGGGSGGGGSGSHSLKYFHTSVSRPGRGEPRFISVGYVDDTQFVRFDNDAASPRMVPRAPWMEQEGSEYWDRETRSARDTAQIFRVNLRTLRGCYNQSEAGSHTLQWMHGCELGPDGRFLRGYEQFAYDGKDYLTLNEDLRSWTAVDTAAQISEQKSNDASEAEHQRAYLEDTCVEWLHKYLEKGKETLLHLEPPKTHVTHHPISDHEATLRCWALGFYPAEITLTWQQDGEGHTQDTELVETRPAGDGTFQKWAAVVVPSGEEQRYTCHVQHEGLPEPVTLRWKPASQPTIPIVGIIAGLVLLGSVVSGAVVAAVIWRKKSSGGKGGSYSKAEWSDSAQGSESHSLGGGGSGGGGSGGGGSGGGGSGSMRKGEELFTGVVPILVELDGDVNGHKFSVRGEGEGDATNGKLTLKFICTTGKLPVPWPTLVTTLTYGVQCFARYPDHMKQHDFFKSAMPEGYVQERTISFKDDGTYKTRAEVKFEGDTLVNRIELKGIDFKEDGNILGHKLEYNFNSHNVYITADKQKNGIKANFKIRHNVEDGSVQLADHYQQNTPIGDGPVLLPDNHYLSTQSVLSKDPNEKRDHMVLLEFVTAAGITHGMDELYK

SEQ ID NO: 1022 - protein, 335 aa, synthetic construct
GRAMVARLGLGLLLLALLLPTQIYSSETTTGTSSNSSQSTSNSGLAPNPTNATTKAAGGALQSTASLFVVSLSLLHLYSEGRGSLLTCGDVEENPGPMRKGEELFTGVVPILVELDGDVNGHKFSVRGEGEGDATNGKLTLKFICTTGKLPVPWPTLVTTLTYGVQCFARYPDHMKQHDFFKSAMPEGYVQERTISFKDDGTYKTRAEVKFEGDTLVNRIELKGIDFKEDGNILGHKLEYNFNSHNVYITADKQKNGIKANFKIRHNVEDGSVQLADHYQQNTPIGDGPVLLPDNHYLSTQSVLSKDPNEKRDHMVLLEFVTAAGITHGMDELYK

SEQ ID NO: 1023 - protein, 79 aa, synthetic construct
GRAMVARLGLGLLLLALLLPTQIYSSETTTGTSSNSSQSTSNSGLAPNPTNATTKAAGGALQSTASLFVVSLSLLHLYS

SEQ ID NO: 1024 - protein, 353 aa, synthetic construct
LFNQEVQIPLTESYCGPCPKNWICYKNNCYQFFDESKNWYESQASCMSQNASLLKVYSKEDQDLLKLVKSYHWMGLVHIPTNGSWQWEDGSILSPNLLTIIEMQKGDCALYASSFKGYIENCSTPNTYICMQRTVTTTPAPRPPTPAPTIASQPLSLRPEACRPAAGGAVHTRGLDFACDIYIWAPLAGTCGVLLLSLVITLYCRRDQRLPPDAHKPPGGGSFRTPIQEEQADAHSTLAKIRVKFSRSADAPAYQQGQNQLYNELNLGRREEYDVLDKRRGRDPEMGGKPRRKNPQEGLYNELQKDKMAEAYSEIGMKGERRRGKGHDGLYQGLSTATKDTYDALHMQALPPR

SEQ ID NO: 1025 - protein, 353 aa, synthetic construct; identical to SEQ ID NO: 1024

SEQ ID NO: 1026 - protein, 685 aa, synthetic construct
DIQMTQSPSSLSASVGDRVTITCRASQDISKYLNWYQQKPGGTVKLLIYHTSRLHSGVPSRFSGSGSGTDFTLTISSLQPEDIATYFCQQGNTLPYTFGGGTKLEITGGGGSGGGGSGGGGSQVQLQESGPGLVKPSQTLSLTCTVSGVSLPDYGVSWIRQPPGKGLEWIGVIWGSETTYYNSALKSRLTISKDNSKNQVSLKLSSVTAADTAVYYCAKHYYYGGSYAMDYWGQGTSVTVSSTTTPAPRPPTPAPTIASQPLSLRPEACRPAAGGAVHTRGLDFACDIYIWAPLAGTCGVLLLSLVITLYCRRDQRLPPDAHKPPGGGSFRTPIQEEQADAHSTLAKIRVKFSRSADAPAYQQGQNQLYNELNLGRREEYDVLDKRRGRDPEMGGKPRRKNPQEGLYNELQKDKMAEAYSEIGMKGERRRGKGHDGLYQGLSTATKDTYDALHMQALPPRGSGEGRGSLLTCGDVEENPGPMALPVTALLLPLALLLHAARPNWVNVISDLKKIEDLIQSMHIDATLYTESDVHPSCKVTAMKCFLLELQVISLESGDASIHDTVENLIILANNSLSSNGNVTESGCKECEELEEKNIKEFLQSFVHIVQMFINTSTTTPAPRPPTPAPTIASQPLSLRPEACRPAAGGAVHTRGLDFACDIYIWAPLAGTCGVLLLSLVITLYC

SEQ ID NO: 1027 - protein, 460 aa, synthetic construct
DIQMTQSPSSLSASVGDRVTITCRASQDISKYLNWYQQKPGGTVKLLIYHTSRLHSGVPSRFSGSGSGTDFTLTISSLQPEDIATYFCQQGNTLPYTFGGGTKLEITGGGGSGGGGSGGGGSQVQLQESGPGLVKPSQTLSLTCTVSGVSLPDYGVSWIRQPPGKGLEWIGVIWGSETTYYNSALKSRLTISKDNSKNQVSLKLSSVTAADTAVYYCAKHYYYGGSYAMDYWGQGTSVTVSSTTTPAPRPPTPAPTIASQPLSLRPEACRPAAGGAVHTRGLDFACDIYIWAPLAGTCGVLLLSLVITLYCRRDQRLPPDAHKPPGGGSFRTPIQEEQADAHSTLAKIRVKFSRSADAPAYQQGQNQLYNELNLGRREEYDVLDKRRGRDPEMGGKPRRKNPQEGLYNELQKDKMAEAYSEIGMKGERRRGKGHDGLYQGLSTATKDTYDALHMQALPPR

SEQ ID NO: 1028 - protein, 86 aa, synthetic construct
LQNRRGLDLLFLKEGGLTTTPAPRPPTPAPTIASQPLSLRPEACRPAAGGAVHTRGLDFACDIYIWAPLAGTCGVLLLSLVITLYC

SEQ ID NO: 1029 - protein, 86 aa, synthetic construct; identical to SEQ ID NO: 1028

SEQ ID NO: 1030 - protein, 96 aa, synthetic construct
LQNRRGLDLLFLKEGGLCAALKEECCFTTTPAPRPPTPAPTIASQPLSLRPEACRPAAGGAVHTRGLDFACDIYIWAPLAGTCGVLLLSLVITLYC

SEQ ID NO: 1031 - protein, 97 aa, synthetic construct
LQNRRGLDLLFLKEGGLCAALKEECCFYTTTPAPRPPTPAPTIASQPLSLRPEACRPAAGGAVHTRGLDFACDIYIWAPLAGTCGVLLLSLVITLYC

SEQ ID NO: 1032 - protein, 83 aa, synthetic construct
AQNRRGLDLLFWEQTTTPAPRPPTPAPTIASQPLSLRPEACRPAAGGAVHTRGLDFACDIYIWAPLAGTCGVLLLSLVITLYC

SEQ ID NO: 1033 - protein, 97 aa, synthetic construct
AQNRRGLDLLFWEQGGLCKALQEQCRFPTTTPAPRPPTPAPTIASQPLSLRPEACRPAAGGAVHTRGLDFACDIYIWAPLAGTCGVLLLSLVITLYC

SEQ ID NO: 1034 - protein, 144 aa, synthetic construct
GALFLGFLGAAGSTMGAASVTLTVQARQLLSGIVQQQSNLLRAIEAQQHMLQLTVWGIKQLQARVLAVERYLKDQTTTPAPRPPTPAPTIASQPLSLRPEACRPAAGGAVHTRGLDFACDIYIWAPLAGTCGVLLLSLVITLYC

SEQ ID NO: 1035 - protein, 144 aa, synthetic construct
GALFLGFLGAAGSTMGAASVTLTVQARLLLSGIVQQQNNLLRAIEAQQHLLQLTVWGIKQLQARVLAVERYLRDQTTTPAPRPPTPAPTIASQPLSLRPEACRPAAGGAVHTRGLDFACDIYIWAPLAGTCGVLLLSLVITLYC

SEQ ID NO: 1036 - protein, 83 aa, synthetic construct
LQARILAVERYLKDTTTPAPRPPTPAPTIASQPLSLRPEACRPAAGGAVHTRGLDFACDIYIWAPLAGTCGVLLLSLVITLYC

SEQ ID NO: 1037 - protein, 83 aa, synthetic construct; identical to SEQ ID NO: 1036

SEQ ID NO: 1038 - protein, 126 aa, synthetic construct
AGFGLLLGFGGGGSGGGGSGGGGSAGFGLLLGFGGGGSGGGGSGGGGSAGFGLLLGFTTTPAPRPPTPAPTIASQPLSLRPEACRPAAGGAVHTRGLDFACDIYIWAPLAGTCGVLLLSLVITLYC

SEQ ID NO: 1039 - protein, 126 aa, synthetic construct; identical to SEQ ID NO: 1038

SEQ ID NO: 1040 - protein, 183 aa, synthetic construct
LQNRRGLDLLFLKEGGLCAALKEECCFYGGGGSGGGGSGGGGSLQNRRGLDLLFLKEGGLCAALKEECCFYGGGGSGGGGSGGGGSLQNRRGLDLLFLKEGGLCAALKEECCFYTTTPAPRPPTPAPTIASQPLSLRPEACRPAAGGAVHTRGLDFACDIYIWAPLAGTCGVLLLSLVITLYC

SEQ ID NO: 1041 - protein, 183 aa, synthetic construct; identical to SEQ ID NO: 1040

SEQ ID NO: 1042 - protein, 348 aa, synthetic construct
HVLRYGYTGIFDDTSHMTLTVVGIFDGQHFFTYHVNSSDKASSRANGTISWMANVSAAYPTYLDGERAKGDLIFNQTEQNLLELEIALGYRSQSVLTWTHECNTTENGSFVAGYEGFGWDGETLMELKDNLTLWTGPNYEISWLKQNKTYIDGKIKNISEGDTTIQRNYLKGNCTQWSVIYSGFQTPVTHPVVKGGVRNQNDNRAEAFCTSYGFFPGEINITFIHYGNKAPDDSEPQCNPLLPTFDGTFHQGCYVAIFCNQNYTCRVTHGNWTVEIPISVTSPDDSSSGEVPDHPTANKRYNTMTISSVLLALLLCALLFAFLHYFTTLKQYLRNLAFAWRYRKVRSS

SEQ ID NO: 1043 - protein, 505 aa, synthetic construct
SRSVALAVLALLSLSGLEAIQRTPKIQVYSRHPAENGKSNFLNCYVSGFHPSDIEVDLLKNGERIEKVEHSDLSFSKDWSFYLLYYTEFTPTEKDEYACRVNHVTLSQPKIVKWDRDMGGGGSGGGGSGGGGSGGGGSMTMWCLTLFVLWMLRVVGMHVLRYGYTGIFDDTSHMTLTVVGIFDGQHFFTYHVNSSDKASSRANGTISWMANVSAAYPTYLDGERAKGDLIFNQTEQNLLELEIALGYRSQSVLTWTHECNTTENGSFVAGYEGFGWDGETLMELKDNLTLWTGPNYEISWLKQNKTYIDGKIKNISEGDTTIQRNYLKGNCTQWSVIYSGFQTPVTHPVVKGGVRNQNDNRAEAFCTSYGFFPGEINITFIHYGNKAPDDSEPQCNPLLPTFDGTFHQGCYVAIFCNQNYTCRVTHGNWTVEIPISVTSPDDSSSGEVPDHPTANKRYNTMTISSVLLALLLCALLFAFLHYFTTLKQYLRNLAFAWRYRKVRSS

SEQ ID NO: 1044 - protein, 322 aa, synthetic construct
WPLVAALLLGSACCGSAQLLFNKTKSVEFTFCNDTVVIPCFVTNMEAQNTTEVYVKWKFKGRDIYTFDGALNKSTVPTDFSSAKIEVSQLLKGDASLKMDKSDAVSHTGNYTCEVTELTREGETIIELKYRVVSWFSPNENILIVIFPIFAILLFWGQFGIKTLKYRSGGMDEKTIALLVAGLVITVIVIVGAILFVPGEYSLKNATGLGLIVTSTGILILLHYYVFSTAIGLTSFVIAILVIQVIAYILAVVGLSLCIAACIPMHGPLLISGLSILALAQLLGLVYMKFVASNQKTIQPPRKAVEEPLNAFKESKGMMNDE

SEQ ID NO: 1045 - protein, 90 aa, synthetic construct
GNYTCEVTELTREGETIIELKTTTPAPRPPTPAPTIASQPLSLRPEACRPAAGGAVHTRGLDFACDIYIWAPLAGTCGVLLLSLVITLYC

SEQ ID NO: 1046 - protein, 90 aa, synthetic construct; identical to SEQ ID NO: 1045

SEQ ID NO: 1047 - protein, 133 aa, synthetic construct
LQNRRGLDLLFLKEGGLCAALKEECCFYGGGGSGGGGSGGGGSGNYTCEVTELTREGETIIELKTTTPAPRPPTPAPTIASQPLSLRPEACRPAAGGAVHTRGLDFACDIYIWAPLAGTCGVLLLSLVITLYC

SEQ ID NO: 1048 - protein, 133 aa, synthetic construct; identical to SEQ ID NO: 1047

SEQ ID NO: 1049 - protein, 133 aa, synthetic construct
GNYTCEVTELTREGETIIELKGGGGSGGGGSGGGGSLQNRRGLDLLFLKEGGLCAALKEECCFYTTTPAPRPPTPAPTIASQPLSLRPEACRPAAGGAVHTRGLDFACDIYIWAPLAGTCGVLLLSLVITLYC

SEQ ID NO: 1050 - protein, 133 aa, synthetic construct; identical to SEQ ID NO: 1049

SEQ ID NO: 1051 - protein, 180 aa, synthetic construct
GALFLGFLGAAGSTMGAASVTLTVQARQLLSGIVQQQSNLLRAIEAQQHMLQLTVWGIKQLQARVLAVERYLKDQGGGGSGGGGSGGGGSGNYTCEVTELTREGETIIELKTTTPAPRPPTPAPTIASQPLSLRPEACRPAAGGAVHTRGLDFACDIYIWAPLAGTCGVLLLSLVITLYC

SEQ ID NO: 1052 - protein, 180 aa, synthetic construct
GALFLGFLGAAGSTMGAASVTLTVQARLLLSGIVQQQNNLLRAIEAQQHLLQLTVWGIKQLQARVLAVERYLRDQGGGGSGGGGSGGGGSGNYTCEVTELTREGETIIELKTTTPAPRPPTPAPTIASQPLSLRPEACRPAAGGAVHTRGLDFACDIYIWAPLAGTCGVLLLSLVITLYC

SEQ ID NO: 1053 - protein, 119 aa, synthetic construct
LQARILAVERYLKDGGGGSGGGGSGGGGSGNYTCEVTELTREGETIIELKTTTPAPRPPTPAPTIASQPLSLRPEACRPAAGGAVHTRGLDFACDIYIWAPLAGTCGVLLLSLVITLYC

SEQ ID NO: 1054 - protein, 119 aa, synthetic construct; identical to SEQ ID NO: 1053

SEQ ID NO: 1055 - protein, 133 aa, synthetic construct
AQNRRGLDLLFWEQGGLCKALQEQCRFPGGGGSGGGGSGGGGSGNYTCEVTELTREGETIIELKTTTPAPRPPTPAPTIASQPLSLRPEACRPAAGGAVHTRGLDFACDIYIWAPLAGTCGVLLLSLVITLYC

SEQ ID NO: 1056 - protein, 133 aa, synthetic construct; identical to SEQ ID NO: 1055

SEQ ID NO: 1057 - protein, 176 aa, synthetic construct
GNYTCEVTELTREGETIIELKGGGGSGGGGSGGGGSLQNRRGLDLLFLKEGGLCAALKEECCFYGGGGSGGGGSGGGGSLQNRRGLDLLFLKEGGLCAALKEECCFYTTTPAPRPPTPAPTIASQPLSLRPEACRPAAGGAVHTRGLDFACDIYIWAPLAGTCGVLLLSLVITLYC

SEQ ID NO: 1058 - protein, 176 aa, synthetic construct; identical to SEQ ID NO: 1057

SEQ ID NO: 1059 - protein, 87 aa, synthetic construct
LQNRRGLDLLFLKEGGLCTTTPAPRPPTPAPTIASQPLSLRPEACRPAAGGAVHTRGLDFACDIYIWAPLAGTCGVLLLSLVITLYC

SEQ ID NO: 1060 - protein, 532 aa, synthetic construct
MWPLVAALLLGSACCGSAQLLFNKTKSVEFTFCNDTVVIPCFVTNMEAQNTTEVYVKWKFKGRDIYTFDGALNKSTVPTDFSSAKIEVSQLLKGDASLKMDKSDAVSHTGNYTCEVTELTREGETIIELKYRVVSWFSPNENILIVIFPIFAILLFWGQFGIKTLKYRSGGMDEKTIALLVAGLVITVIVIVGAILFVPGEYSLKNATGLGLIVTSTGILILLHYYVFSTAIGLTSFVIAILVIQVIAYILAVVGLSLCIAACIPMHGPLLISGLSILALAQLLGLVYMKFVEMVSKGEELFTGVVPILVELDGDVNGHKFSVSGEGEGDATYGKLTLKFICTTGKLPVPWPTLVTTLTYGVQCFSRYPDHMKQHDFFKSAMPEGYVQERTIFFKDDGNYKTRAEVKFEGDTLVNRIELKGIDFKEDGNILGHKLEYNYNSHNVYIMADKQKNGIKVNFKIRHNIEDGSVQLADHYQQNTPIGDGPVLLPDNHYLSTQSALSKDPNEKRDHMVLLEFVTAAGITLGMDELYK

SEQ ID NO: 1061 - protein, 195 aa, synthetic construct
AVGIGALFLGFLGAAGSTMGAASMTLTVQARQLLSGIVQQQNNLLRAIEAQQHLLQLTVWGIKQLQARILAVERYLKDQQLLGIWGCSGKLICTTAVPWNASWSNKSLEQIWNHTTWMEWDREINNYTSLIHSLIEESQNQQEKNEQELLELDKWASLWNWFNITNWLWYIKLFIMIVGGLVGLRIVFAVLSIVN

SEQ ID NO: 1062 - protein, 164 aa, synthetic construct
EPVSLTLALLLGGLTMGGIAAGVGTGTTALVATQQFQQLQAAVHNDLKEVEKSITNLEKSLTSLSEVVLQNRRGLDLLFLKEGGLCAALKEECCFYADHTGLVRDSMAKLRERLSQRQKLFESQQGWFEGLFNKSPWFTTLISTIMGPLIILLLILLFGPCILN

SEQ ID NO: 1063 - protein, 277 aa, synthetic construct
MATLLLLLGVLVVSPDALGSTTAVQTPTSGEPLVSTSEPLSSKMYTTSITSDPKADSTGDQTSALPPSTSINEGSPLWTSIGASTGSPLPEPTTYQEVSIKMSSVPQETPHATSHPAVPITANSLGSHTVTGGTITTNSPETSSRTSGAPVTTAASSLETSRGTSGPPLTMATVSLETSKGTSGPPVTMATDSLETSTGTTGPPVTMTTGSLEPSSGASGPQVSSVKLSTMMSPTTSTNASTVPFRNPDENSRGMLPVAVLVALLAVIVLVALLLLW

SEQ ID NO: 1064 - protein, 187 aa, synthetic construct
MERDLERGPPGPPRPPLGPPLSSSIGLALLLLLLALLFWLYIVMSNWTGGALLVLYSFALMLIIIILIIFIFRRDLLCPLGGLGLLLLMITLLLIALWNLHGQALYLGIVLFIFGCLLVLGLWIYFLEILWRLGATIWQLLAFILAFFLAIILLIIALYLQQNWWTLLVDLLWLLLFMAILIWMYYH

SEQ ID NO: 1065 - protein, 400 aa, synthetic construct
MLLAALLAALVARTTLGADVDAVPAPTFPPPAYPYTESWQLTLTTVPSPFVGPADVYHTRPLEDPCGVVALISDPQVDRLLNEAVAHRRPTYRAHVAWYRIADGCAHLLYFIEYADCDPRQIFGRCRRRTTPMWWTPSADYMFPTEDELGLLMVAPGRFNEGQYRRLVSVDGVNILTDFMVALPEGQECPFARVDQHRTYKFGACWNDESFRRGVDVMRFLTPFYQQPPHREVVNYWYRKNGRTLPRAYAAATPYAIDPARPSAGSPRPRPRPRPRPKPEPAPVTPAPPGRLPEPATRDHAAGGHPTPRPPRPETPHRPFAPPAVVPSGWPQPAEPFQPRTPAAPGVSRHRSVIVGTGTAMGALLVGVCVYIFFRLRGAKGYRLLGGPADTDELKAQPGP

SEQ ID NO: 1066 - protein, 153 aa, synthetic construct
FFLIMFLTIIVCGMVAALSAIRANCHQEPSVCLQAACPESWIGFQRKCFYFSDDTKNWTSSQRFCDSQDADLAQVESFQELNFLLRYKGPSDHWIGLSREQGQPWKWINGTEWTRQFPILGAGECAYLNDKGASSARHYTERKWICSKSDIHV

SEQ ID NO: 1067 - protein, 162 aa, synthetic construct
MWPLVAALLLGSACCGSAQLLFNKTKSVEFTFCNDTVVIPCFVTNMEAQNTTEVYVKWKFKGRDIYTFDGALNKSTVPTDFSSAKIEVSQLLKGDASLKMDKSDAVSHTGNYTCEVTELTREGETIIELKYRVVSWFSPNENILIVIFPIFAILLFWGQFGI

SEQ ID NO: 1068 - protein, 101 aa, synthetic construct
LGLALLLLLLALLFWLYIVMSDWTGGALLVLYTTTPAPRPPTPAPTIASQPLSLRPEACRPAAGGAVHTRGLDFACDIYIWAPLAGTCGVLLLSLVITLYC

SEQ ID NO: 1069 - protein, 104 aa, synthetic construct
LALLFWLLALLFWLLALLFWLLALLFWLLALLFWLTTTPAPRPPTPAPTIASQPLSLRPEACRPAAGGAVHTRGLDFACDIYIWAPLAGTCGVLLLSLVITLYC

SEQ ID NO: 1070 - protein, 92 aa, synthetic construct
AVGIGALFLGFLGAAGSTMGAASMTLTVQARQLLSGIVQQQNNLLRAIEAQQHLLQLTVWGIKQLQARILLFIMIVGGLVGLRIVFAVLSIV

SEQ ID NO: 1071 - protein, 42 aa, synthetic construct
LQNRRGLDLLFLKEGGLCIYIWAPLAGTCGVLLLSLVITLYC

SEQ ID NO: 1072 - protein, 69 aa, synthetic construct
LQNRRGLDLLFLKEGGLAQNRRGLDLLFWEQGGLCKALQEQCRFPIYIWAPLAGTCGVLLLSLVITLYC

SEQ ID NO: 1073 - protein, 73 aa, synthetic construct
LQNRRGLDLLFLKEGGLLGLALLLLLLALLFWLYIVMSDWTGGALLVLYIYIWAPLAGTCGVLLLSLVITLYC

SEQ ID NO: 1074 - protein, 109 aa, synthetic construct
AVGIGALFLGFLGAAGLQNRRGLDLLFLKEGGLSTMGAASMTLTVQARQLLSGIVQQQNNLLRAIEAQQHLLQLTVWGIKQLQARILLFIMIVGGLVGLRIVFAVLSIV

SEQ ID NO: 1075 - protein, 85 aa, synthetic construct
LGLALLLLLLALLFWLTTTPAPRPPTPAPTIASQPLSLRPEACRPAAGGAVHTRGLDFACDIYIWAPLAGTCGVLLLSLVITLYC

SEQ ID NO: 1076 - protein, 194 aa, synthetic construct
LGLALLLLLLALLFWLYIVMSDWTGGALLVLYMWPLVAALLLGSACCGSAQLLFNKTKSVEFTFCNDTVVIPCFVTNMEAQNTTEVYVKWKFKGRDIYTFDGALNKSTVPTDFSSAKIEVSQLLKGDASLKMDKSDAVSHTGNYTCEVTELTREGETIIELKYRVVSWFSPNENILIVIFPIFAILLFWGQFGI

SEQ ID NO: 1077 - protein, 190 aa, synthetic construct
LQNRRGLDLLFLKEGGLCAALKEECCFYMWPLVAALLLGSACCGSAQLLFNKTKSVEFTFCNDTVVIPCFVTNMEAQNTTEVYVKWKFKGRDIYTFDGALNKSTVPTDFSSAKIEVSQLLKGDASLKMDKSDAVSHTGNYTCEVTELTREGETIIELKYRVVSWFSPNENILIVIFPIFAILLFWGQFGI

SEQ ID NO: 1078 - protein, 232 aa, synthetic construct
AVGIGALFLGFLGAAGWPLVAALLLGSACCGSAQLLFNKTKSVEFTFCNDTVVIPCFVTNMEAQNTTEVYVKWKFKGRDIYTFDGALNKSTVPTDFSSAKIEVSQLLKGDASLKMDKSDAVSHTGNYTCEVTELTREGETIIELKYRVVSWFSPNESTMGAASMTLTVQARQLLSGIVQQQNNLLRAIEAQQHLLQLTVWGIKQLQARILLFIMIVGGLVGLRIVFAVLSIV

SEQ ID NO: 1079 - protein, 310 aa, synthetic construct
QVQLVESEGGLVQPGGSLRLSCAASGFTFSSYEMNWVRQAPGKGLEWVSYISSSGSTIYYADSVKGRFTISRDNAKNSLYLQMNSLRAEDTAVYYCAREAKGYYYGMDVWGQGTTVTVSSGGGGSGGGGSGGGGSQPVLTQSPSVSVSPGQTASITCSGDKLGDTYACWYQQKPGQSPVLVIYQDTKRPSGIPERFSGSNSGNTATLTISGTQAMDEADYYCQAWDSSTVVFGGGTKLTVLTTTPAPRPPTPAPTIASQPLSLRPEACRPAAGGAVHTRGLDFACDIYIWAPLAGTCGVLLLSLVITLYC

SEQ ID NO: 1080 - protein, 151 aa, synthetic construct
AVPVAVWLVSALAMGAGVAGGITGSMSLASGKSLLHEVDKDISQLTQAIVKNHKNLLKIAQYAAQNRRGLDLLFWEQGGLCKALQEQCRFPNITNSHVPILQERPPLENRVLTGWGLNWDLGLSQWAREALQTGITLVALLLLVILAGPCI

SEQ ID NO: 1081 - protein, 451 aa, synthetic construct
GQIVTFFQEVPHVIEEVMNIVLIALSILAILKGLYNVATCGLIGLVTFLLLSGRSCSLIYKGTYELQTLELNMETLNMTMPLSCTKNNSHHYIRVGNETGLELTLTNTSILNHKFCNLSDAHKRNLYDHSLMSIISTFHLSIPNFNQYEAMSCDFNGGKITVQYNLSHSFAVDAAGHCGTLANGVLQTFMRMAWGGSYIALDSGRGNWDCIMTSYQYLIIQNTTWDDHCQFSRPSPIGYLGLLSQRTRDIYISRRLLGTFTWTLSDSEGKDTPGGYCLTRWMLIEAELKCFGNTAVAKCNEKHDEEFCDMLRLFDFNKQAIRRLKTEAQMSIQLINKAVNALINDQLIMKNHLRDIMGIPYCNYSRYWYLNHTSTGKTSLPRCWLISNGSYLNETKFSDDIEQQADNMITEMLQKEYIDRQGKTPLGLVDLFVFSTSFYLISIFLHLVKIP

SEQ ID NO: 1082 - protein, 639 aa, synthetic construct
MPLGVVTNSTLEVTEIDQLVCKDHLASTDQLKSVGLNLEGSGVSTDIPSATKRWGFRSGVPPKVVSYEAGEWAENCYNLEIKKPDGSECLPPPPDGVRGFPRCRYVHKAQGTGPCPGDYAFHKDGAFFLYDRLASTVIYRGVNFAEGVIAFLILAKPKETFLQSPPIREAVNYTENTSSYYATSYLEYEIENFGAQHSTTLFKIDNNTFVRLDRPHTPQFLFQLNDTIHLHQQLSNTTGRLIWTLDANINADIGEWAFWENKKNLSEQLRGEELSFEALSLNETEDDDAASSRITKGRISDRATRKYSDLVPKNSPGMVPLHIPEGETTLPSQNSTEGRRVGVNTQETITETAATIIGTNGNHMQISTIGIRPSSSQIPSSSPTTAPSPEAQTPTTHTSGPSVMATEEPTTPPGSSPGPTTEAPTLTTPENITTAVKTVLPQESTSNGLITSTVTGILGSLGLRKRSRRQTNTKATGKCNPNLHYWTAQEQHNAAGIAWIPYFGPGAEGIYTEGLMHNQNALVCGLRQLANETTQALQLFLRATTELRTYTILNRKAIDFLLRRWGGTCRILGPDCCIEPHDWTKNITDKINQIIHDFIDNPLPNQDNDDNWWTGWRQWIPAGIGITGIIIAIIALLCV

SEQ ID NO: 1083 - protein, 170 aa, synthetic construct
QTNTKATGKCNPNLHYWTAQEQHNAAGIAWIPYFGPGAEGIYTEGLMHNQNALVCGLRQLANETTQALQLFLRATTELRTYTILNRKAIDFLLRRWGGTCRILGPDCCIEPHDWTKNITDKINQIIHDFIDNPLPNQDNDDNWWTGWRQWIPAGIGITGIIIAIIALLCV

SEQ ID NO: 1084 - protein, 549 aa, synthetic construct
STSQKSIVAYTMSLGADSSIAYSNNTIAIPTNFSISITTEVMPVSMAKTSVDCNMYICGDSTECANLLLQYGSFCTQLNRALSGIAAEQDRNTREVFAQVKQMYKTPTLKYFGGFNFSQILPDPLKPTKRSFIEDLLFNKVTLADAGFMKQYGECLGDINARDLICAQKFNGLTVLPPLLTDDMIAAYTAALVSGTATAGWTFGAGAALQIPFAMQMAYRFNGIGVTQNVLYENQKQIANQFNKAISQIQESLTTTSTALGKLQDVVNQNAQALNTLVKQLSSNFGAISSVLNDILSRLDKVEAEVQIDRLITGRLQSLQTYVTQQLIRAAEIRASANLAATKMSECVLGQSKRVDFCGKGYHLMSFPQAAPHGVVFLHVTYVPSQERNFTTAPAICHEGKAYFPREGVFVFNGTSWFITQRNFFSPQIITTDNTFVSGNCDVVIGIINNTVYDPLQPELDSFKEELDKYFKNHTSPDVDLGDISGINASVVNIQKEIDRLNEVAKNLNESLIDLQELGKYEQYIKWPWYVWLGFIAGLIAIVMVTILL

SEQ ID NO: 1085 - protein, 591 aa, synthetic construct
VNDGDMRLADGGATNQGRVEIFYRGQWGTVCDNLWDLTDASVVCRALGFENATQALGRAAFGQGSGPIMLDEVQCTGTEASLADCKSLGWLKSNCRHERDAGVVCTNETRSTHTLDLSRELSEALGQIFDSQRGCDLSISVNVQGEDALGFCGHTVILTANLEAQALWKEPGSNVTMSVDAECVPMVRDLLRYFYSRRIDITLSSVKCFHKLASAYGARQLQGYCASLFAILLPQDPSFQMPLDLYAYAVATGDALLEKLCLQFLAWNFEALTQAEAWPSVPTDLLQLLLPRSDLAVPSELALLKAVDTWSWGERASHEEVEGLVEKIRFPMMLPEELFELQFNLSLYWSHEALFQKKTLQALEFHTVPFQLLARYKGLNLTEDTYKPRIYTSPTWSAFVTDSSWSARKSQLVYQSRRGPLVKYSSDYFQAPSDYRYYPYQSFQTPQHPSFLFQDKRVSWSLVYLPTIQSCWNYGFSCSSDELPVLGLTKSGGSDRTIAYENKALMLCEGLFVADVTDFEGWKAAIPSALDTNSSKSTSSFPCPAGHFNGFRTVIRPFYLTNSSGVDIYIWAPLAGTCGVLLLSLVITLYC

SEQ ID NO: 1086 - protein, 79 aa, synthetic construct; identical to SEQ ID NO: 1023

SEQ ID NO: 1087 - protein, 367 aa, synthetic construct
QTHTVGGSTAHNARTLTGMFSLGARQKIQLINTNGSWHINRTALNCNDSLHTGFLASLFYTHSFNSSGCPERMSACRSIEAFRVGWGALQYEDNVTNPEDMRPYCWHYPPRQCGVVSASSVCGPVYCFTPSPVVVGTTDRLGAPTYTWGENETDVFLLNSTRPPQGSWFGCTWMNSTGYTKTCGAPPCRIRADFNASMDLLCPTDCFRKHPDTTYIKCGSGPWLTPRCLIDYPYRLWHYPCTVNYTIFKIRMYVGGVEHRLTAACNFTRGDRCNLEDRDRSQLSPLLHSTTEWAILPCTYSDLPALSTGLLHLHQNIVDVQFMYGLSPALTKYIVRWEWVVLLFLLLADARVCACLWMLILLGQAEA

SEQ ID NO: 1088 - protein, 310 aa, synthetic construct
QPVLTQSPSVSVSPGQTASITCSGDKLGDTYACWYQQKPGQSPVLVIYQDTKRPSGIPERFSGSNSGNTATLTISGTQAMDEADYYCQAWDSSTVVFGGGTKLTVLGGGGSGGGGSGGGGSQVQLVESEGGLVQPGGSLRLSCAASGFTFSSYEMNWVRQAPGKGLEWVSYISSSGSTIYYADSVKGRFTISRDNAKNSLYLQMNSLRAEDTAVYYCAREAKGYYYGMDVWGQGTTVTVSSTTTPAPRPPTPAPTIASQPLSLRPEACRPAAGGAVHTRGLDFACDIYIWAPLAGTCGVLLLSLVITLYC

SEQ ID NO: 1089 - protein, 418 aa, synthetic construct
QLTTESMPFNVAEGKEVLLLVHNLPQQLFGYSWYKGERVDGNRQIVGYAIGTQQATPGPANSGRETIYPNASLLIQNVTQNDTGFYTLQVIKSDLVNEEATGQFHVYPELPKPSISSNNSNPVEDKDAVAFTCEPETQDTTYLWWINNQSLPVSPRLQLSNGNRTLTLLSVTRNDTGPYECEIQNPVSANRSDPVTLNVTYGPDTPTISPSDTYYRPGANLSLSCYAASNPPAQYSWLINGTFQQSTQELFIPNITVNNSGSYTCHANNSVTGCNRTTVKTIIVTELSPVVAKPQIKASKTTVTGDKDSVNLTCSTNDTGISIRWFFKNQSLPSSERMKLSQGNTTLSINPVKREDAGTYWCEVFNPISKNQSDPIMLNVNYNALPQENGLSPGAIAGIVIGVVALVALIAVALACFL

SEQ ID NO: 1090 - protein, 347 aa, synthetic construct
WPPPGTGDVVVQAPTQVPGFLGDSVTLPCYLQVPNMEVTHVSRLTWARHGESGAMAVFHQTQGPAYSESKRLEFVAARLGAELRNASLRMFGLRVEDEGNYTCLFVTFPQGSRSVDIWLRVLAKPQNTAEVQKVQLTGEPVPMARCVSTGGRPPAQITWHSDLGGMPNTSQVPGFLSGTVTVTSLWILVPSSQVDGKNVTCKVEHESFEKPQLLTVNLTVYYPPEVSISGYDNNWYLGQNEATLTCDARSNPEPTGYNWSTTMGPLPPFAVAQGAQLLIRPVDKPINTTLICNVTNALGARQAELTVQVKEGPPSEHSGISRNAIIFLVLGILVFLILLGIGIYFYW

SEQ ID NO: 1091 - protein, 593 aa, synthetic construct
QENSFTINSVDMKSLPDWTVQNGKNLTLQCFADVSTTSHVKPQHQMLFYKDDVLFYNISSMKSTESYFIPEVRIYDSGTYKCTVIVNNKEKTTAEYQVLVEGVPSPRVTLDKKEAIQGGIVRVNCSVPEEKAPIHFTIEKLELNEKMVKLKREKNSRDQNFVILEFPVEEQDRVLSFRCQARIISGIHMQTSESTKSELVTVTESFSTPKFHISPTGMIMEGAQLHIKCTIQVTHLAQEFPEIIIQKDKAIVAHNRHGNKAVYSVMAMVEHSGNYTCKVESSRISKVSSIVVNITELFSKPELESSFTHLDQGERLNLSCSIPGAPPANFTIQKEDTIVSQTQDFTKIASKSDSGTYICTAGIDKVVKKSNTVQIVVCEMLSQPRISYDAQFEVIKGQTIEVRCESISGTLPISYQLLKTSKVLENSTKNSNDPAVFKDNPTEDVEYQCVADNCHSHAKMLSEVLRVKVIAPVDEVQISILSSKVVESGEDIVLQCAVNEGSGPITYKFYREKEGKPFYQMTSNATQAFWTKQKASKEQEGEYYCTAFNRANHASSVPRSKILTVRVILAPWKKGLIAVVIIGVIIALLIIAA

SEQ ID NO: 1092 - protein, 346 aa, synthetic construct
QVVQVNDSMYGFIGTDVVLHCSFANPLPSVKITQVTWQKSTNGSKQNVAIYNPSMGVSVLAPYRERVEFLRPSFTDGTIRLSRLELEDEGVYICEFATFPTGNRESQLNLTVMAKPTNWIEGTQAVLRAKKGQDDKVLVATCTSANGKPPSVVSWETRLKGEAEYQEIRNPNGTVTVISRYRLVPSREAHQQSLACIVNYHMDRFKESLTLNVQYEPEVTIEGFDGNWYLQRMDVKLTCKADANPPATEYHWTTLNGSLPKGVEAQNRTLFFKGPINYSLAGTYICEATNPIGTRSGQVEVNITEFPYTPSPPEHGRRAGPVPTAIIGGVAGSILLVLIVVGGIVV

SEQ ID NO: 1093 - protein, 229 aa, synthetic construct
QVQVVTQDEREQLYTPASLKCSLQNAQEALIVTWQKKKAVSPENMVTFSENHGVVIQPAYKDKINITQLGLQNSTITFWNITLEDEGCYMCLFNTFGFGKISGTACLTVYVQPIVSLHYKFSEDHLNITCSATARPAPMVFWKVPRSGIENSTVTLSHPNGTTSVTSILHIKDPKNQVGKEVICQVLHLGTVTDFKQTVNKGYWFSVPLLLSIVSLVILLVLISILLYW

SEQ ID NO: 1094 - protein, 499 aa, synthetic construct; identical to SEQ ID NO: 1017

SEQ ID NO: 1095 - protein, 491 aa, synthetic construct
SRSVALAVLALLSLSGLEAVMAPRTLFLGGGGSGGGGSGGGGSIQRTPKIQVYSRHPAENGKSNFLNCYVSGFHPSDIEVDLLKNGERIEKVEHSDLSFSKDWSFYLLYYTEFTPTEKDEYACRVNHVTLSQPKIVKWDRDMGGGGSGGGGSGGGGSGGGGSGSLLSGALTLTETWAGSHSMRYFSAAVSRPGRGEPRFIAMGYVDDTQFVRFDSDSACPRMEPRAPWVEQEGPEYWEEETRNTKAHAQTDRMNLQTLRGYYNQSEASSHTLQWMIGCDLGSDGRLLRGYEQYAYDGKDYLALNEDLRSWTAADTAAQISKRKCEAANVAEQRRAYLEGTCVEWLHRYLENGKEMLQRADPPKTHVTHHPVFDYEATLRCWALGFYPAEIILTWQRDGEDQTQDVELVETRPAGDGTFQKWAAVVVPSGEEQRYTCHVQHEGLPEPLMLRWKQSSLPTIPIMGIVAGLVVLAAVVTGAAVAAVLWRKKSSD

SEQ ID NO: 1096 - protein, 513 aa, synthetic construct; identical to SEQ ID NO: 1020

SEQ ID NO: 1097 - protein, 711 aa, synthetic construct
MALPVTALLLPLALLLHAARPDIQMTQSPSSLSASVGDRVTITCRASQDISKYLNWYQQKPGGTVKLLIYHTSRLHSGVPSRFSGSGSGTDFTLTISSLQPEDIATYFCQQGNTLPYTFGGGTKLEITGGGGSGGGGSGGGGSQVQLQESGPGLVKPSQTLSLTCTVSGVSLPDYGVSWIRQPPGKGLEWIGVIWGSETTYYNSALKSRLTISKDNSKNQVSLKLSSVTAADTAVYYCAKHYYYGGSYAMDYWGQGTSVTVSSTTTPAPRPPTPAPTIASQPLSLRPEACRPAAGGAVHTRGLDFACDIYIWAPLAGTCGVLLLSLVITLYCKRGRKKLLYIFKQPFMRPVQTTQEEDGCSCRFPEEEEGGCELRVKFSRSADAPAYQQGQNQLYNELNLGRREEYDVLDKRRGRDPEMGGKPRRKNPQEGLYNELQKDKMAEAYSEIGMKGERRRGKGHDGLYQGLSTATKDTYDALHMQALPPRGSGEGRGSLLTCGDVEENPGPMALPVTALLLPLALLLHAARPNWVNVISDLKKIEDLIQSMHIDATLYTESDVHPSCKVTAMKCFLLELQVISLESGDASIHDTVENLIILANNSLSSNGNVTESGCKECEELEEKNIKEFLQSFVHIVQMFINTSTTTPAPRPPTPAPTIASQPLSLRPEACRPAAGGAVHTRGLDFACDIYIWAPLAGTCGVLLLSLVITLYC

SEQ ID NO: 1098 - protein, 9 aa, synthetic construct
VIWGSETTY

1-84. (canceled)

85. A population of genetically engineered immune cells comprising natural killer (NK) cells and T cells, wherein:
the T cells are genetically edited to comprise reduced expression of TAPBP protein; and
the T cells are engineered to express a chimeric antigen receptor (CAR) comprising an extracellular ligand-binding domain, a transmembrane domain, and a cytotoxic signaling complex.

86. The population of genetically engineered immune cells of claim 85, wherein at least about 80%, at least about 90%, at least about 95%, or at least about 99% of the T cells express major histocompatibility complex class I (MHC I) molecules.

87. The population of genetically engineered immune cells of claim 85, wherein the NK cells express a CAR comprising an extracellular ligand-binding domain, a transmembrane domain, and a cytotoxic signaling complex.

88. A method for the treating a subject having a disease or disorder comprising administering to the subject the population of genetically engineered immune cells according to claim 85.

89. A population of genetically engineered immune cells comprising natural killer (NK) cells and T cells, wherein:
the T cells are genetically edited to comprise reduced expression of TAP-1 protein; and
the T cells are engineered to express a chimeric antigen receptor (CAR) comprising an extracellular ligand-binding domain, a transmembrane domain, and a cytotoxic signaling complex.

90. The population of genetically engineered immune cells of claim 89, wherein at least about 80%, at least about 90%, at least about 95%, or at least about 99% of the T cells express major histocompatibility complex class I (MHC I) molecules.

91. The population of genetically engineered immune cells of claim 89, wherein the NK cells express a CAR comprising an extracellular ligand-binding domain, a transmembrane domain, and a cytotoxic signaling complex.

92. A method for the treating a subject having a disease or disorder comprising administering to the subject the population of genetically engineered immune cells according to claim 89.

93. A population of genetically engineered immune cells comprising natural killer (NK) cells and T cells, wherein:
the T cells are genetically edited to comprise reduced expression of TAP-2 protein; and
the T cells are engineered to express a chimeric antigen receptor (CAR) comprising an extracellular ligand-binding domain, a transmembrane domain, and a cytotoxic signaling complex.

94. The population of genetically engineered immune cells of claim 93, wherein at least about 80%, at least about 90%, at least about 95%, or at least about 99% of the T cells express major histocompatibility complex class I (MHC I) molecules.

95. The population of genetically engineered immune cells of claim 93, wherein the NK cells express a CAR comprising an extracellular ligand-binding domain, a transmembrane domain, and a cytotoxic signaling complex.

96. A method for the treating a subject having a disease or disorder comprising administering to the subject the population of genetically engineered immune cells according to claim 93.

97. A method of enhancing the in vivo persistence of genetically engineered immune cells, the method comprising:
(a) genetically editing a population of T cells to reduce expression of TAPBP, TAP-1, or TAP-2 protein;
(b) contacting the population of T cells with a polynucleotide encoding a chimeric antigen receptor (CAR) comprising an extracellular ligand binding domain, a transmembrane domain, and a cytotoxic signaling complex; and
(c) combining the population of T cells with a population of natural killer (NK) cells.

98. The method of claim 97, wherein the combining in (c) is in vivo.

99. The method of claim 97, wherein at least about 80%, at least about 90%, at least about 95%, or at least about 99% of the T cells express major histocompatibility complex class I (MHC I) molecules.

100. The method of claim 97, wherein the combining in (c) is done in vitro.

101. The method of claim 100, wherein the NK cells express a CAR comprising an extracellular ligand binding domain, a transmembrane domain, and a cytotoxic signaling complex.

102. The method of claim 100, wherein at least about 80%, at least about 90%, at least about 95%, or at least about 99% of the T cells express major histocompatibility complex class I (MHC I) molecules.

103. The method of claim 97, further comprising administering the combined population of T cells and NK cells to a subject having a disease or condition.

104. The method of claim 103, wherein at least about 80%, at least about 90%, at least about 95%, or at least about 99% of the T cells express major histocompatibility complex class I (MHC I) molecules.
